United States Patent Application Publication US 2023/0074892 A1 - sequence listing, part 2

SEQ ID NO: 11 - DNA, 68811 bp, Bacteriophage
ttctaaatcagtagacactgaagaacaagctgaaactggtgaagcaaaatcagaagaagctgaagaagtacaagaagataacacatttaaaggattaagtcaagaagaacgaactaagttcatggattcttacaaagcacaagctaaagaccctagagcttctaaacatgacttacaatcagcttaccaatcttacttgaacattaacactgaccctactaatgcatcagagaaagatattaaaactgtaaaagactttgcacaaatttaattaatgcacaaagttgtgttatattatacggtgtaactaaagaatataaatagggtacattttactgtaccccacataaaataaaaaagaacacaaaatgaaaggtgataaatttatatgactatcgaaaagaacctgtcagacgttcaacaaaagtacgctgaccaattccaagaagacgtagtaaagtcattccaaactggttatggaatcactcctgatacacaaattgacgcaggagctttacgtagagaaattttagatgaccaaatcacaatgttaacatggactaatgaagacttaatcttctatcgtgatatctcacgccgtcctgctcaatctacagtagtaaatacgaccaatatttacgtcatggtaacgtaggtcactctcgtttcgttaaagaaatcggagtagcaccagtatctgacccaaatatccgtcaaaaaactgtatcaatgaaatacgtttctgatactaaaaatatgtcaattgcatcaggtttagtaaataacattgctgacccatcacaaatccttacagaagatgctatcgcagttgttgcaaaacaattgagtgggcttcattctacggtgacgcttcattaacttctgaagttgaaggtgaaggtctagagtttgatggtttagctaaattaattgacaaaaataacgtaattaacgctaaaggtaatcaattaactgagaaacacttaaatgaggcggcggtacgtatcggtaaaggtttcggtacagctacagatgcttacatgcctatcggtgtacacgcagacttcgttaactcaatcttaggtcgtcaaatgcaattaatgcaagacaacagcggtaacgttaacactggttacagcgtaaatggtttctactcatctcgtggattcattaaattacatggttctacagtaatggaaaatgaactaatcttagatgaatcattacaaccattaccaaatgctccacaacctgctaaagttacagctactgttgaaactaagcaaaaggtgcttttgaaaaatgaagaagaccgtgcaggattatcatataaagtagtagttaactcagatgacgctcaatcagctccttctgaagaagtaacagctacagtatctaacgtagacgatggtgttaaactttcaattaatgttaacgctatgtaccaacaacaaccacaattcgtttctatctaccgtcaaggtaaagaaacaggtatgtacttcctaatcaaacgtgtaccagttaaagatgcacaagaagacggaacaatcgtattcgtagataagaacgaaacattgcctgaaacagcagacgtatttgttggtgaaatgtcaccacaagtagttcacttattcgaattacttccaatgatgaaattaccattagctcaaattaatgcttctattacatttgcagtattatggtatggtgcattagcattacgatgctctaaaaaaatgggctcgtattaaaacgttcgttatatcgcagtttaatagaataagaaaaactgaatacaagagaatagggataaacttagggtttatcccttttttattaaataaacttgaagggatttaataaatatgttatactataagaaactattagataaaaaaatggctactgtttatggtacagtggagattgacaaagatggagtagtcaaaggattaaccaagaacaagaaaagaatttgccaatgttccaggttttgaatttgaagaagaaaagaaaactactagaaaacaatcagcttctactagtaaagaagaagagcctaaggaagaggaaaagcctctactagaaaaactacaaatactactagaaaatctacagcacgtaaaacaacagccaaaaaaaagatgaaaataagtaaagggtgaattaaatggttaactcaatgtttggaggggacttagacccttatgaaaatcattaaactatgaatatccttatcatcctagtggtaatcctaaacacatagatgtaagtgagatagataatttaacattagctgattatggatggtcaccggatgcagttaaagcatatatgttcggtattgtagttcaaaatcctgatacaggacagcctatgggtgacgagttctataaccatatattggaaagagcggtaggtaaagctgaaagagcattagatatatctatactacctgacactcaacatgagatgagagattatcatgagacagagtttaatagttacatgtttgtacatgcttacagaaaacctatattacaggtagagaacttacagctacagtttaatggtagacccatatataaataccctgctaactggtggaaagtagagcatctagcaggacatgttcaattattccctacagcacttatgcaaacaggacaatcaatgtcatacgatgcagtattcaatggatacccctcaattagcaggtgtatacccaccatcagagcaacatcatttgcacctcctcaaatgatacgattagaatatgtatcaggtatgcttccacgtaaaaagcaggaagaaataaaccttgggaaatgcccctgagttagaacagttagttataaaatatgcattgaaagaaatataccaagtatggggtaacttaattattggtgccggtattgctaataaaacattagaagtagacggtattacagaataggtactactcaatcagctatgtatggtggagctagtgctcagatacttcaaataaatgaagatataaagaactattagatggtttaagagctacttttggatataatatgataggattataaggagggttagaaaatggaaaaccgtatatgatagggctaactctaaccctaatgttattaataagtcaacaacatatactactacaacacaagcagatgaacaagataaacctaagtatactactagactagagtttgatacgattgacatgattaggtttattaatgaccaattataaaagtactatgggaagaagcatatttctgtccttgtcttaatctgatacaggacatcctagagtggaattgccctagatgtcatggtaaaggtattgcatatctacctcctaaagagacgataatggcaatacagtctcaaagaaaggaactaaccagttagatataggtatattagatacaggtactgcaataggtaccactcaattagaaagagaatttcctatagagacaggtttactgttcctgaggtattgatgccccaacaaatgatttattttgtgaataaagatagaattaaaaaaggtatacctttatactacgatgtaaagaaataacttatatagccactcaagacggtacagtctatgaagaagattatgaaatcaagaataatagattgtatttaaatgaaaatatgagaatcatacagtaactttaaagatacttatgactttaagatatgtagtatcagatatactaaaagaaagtcgttatcaatatactaagtttaatcaacctaaatcaaaatttgaaaacttacctcaaaattacttcttaaaagggaagatgtcattgtactacaagacccttataaagttaatgatggtatagaagaagacctagaaattcaagtagatgaccctaaggcttcggcatctaatcctagtaatttaggtggattcttcggaggtgcatttaaataatgccagttcatggaaagagacctaatttatttaaaataaaactataagcaggtaggtaagagaacaattgatggtatgcgttcagaagttcttgataaattacaagcaacagcacagcaagtagagaatactagtattaaacgtatgcctacttatctacaaataacagagaaaagcttgaaaagaaggagtagtagaccttaaaaaagctttgctcactcatctaaaaaagaaaactagtaaagatggcggatggtatttaactgtaccaatccgcatcaaaactagtagaatgaataacagtacttatcaagatatgagaactttaaaagtagataaaggaacaggttcagtttcgaagataactgattacctagaaggacgtaggaagaatgtaagccacccttcaatgaagcctgaacctatgactcataatatgactaaagttaaaagaggaaagcaatcttcttactttatatttagaactgtttctagtaagtcacctgctagttcttggatacttaacagagataaagttaatgaagataacttctctaaaacaactctaaaaactgttaagcaattaatgaactggaagatgaaaaatttaaattaagaggagggttagtattaaatggcaataacatcagttgattcatatttattatcagaaataaagcctagacttaacactgtgctagaaattgttatattatagatgaagttttaaagactttgattatcaaactagagagagctttaaagaagctttctggtagaaatgcacaacatgaagtaacggtaggatttaacttcccaaaatttaaaataactatgaagctcattactttgacagccaattaggtcaaggacaagagacaaaaaactctttagaaggtattcagtcatcttactttgaggcaacaggagatactttaatgaatcttctacagcaataagagaagatgataagttagttttactgtttctaaaccaataggagagttaataaaggtagaagatatagagtttgctaaatacgataatcttcaggttgaaggtaataaggtatcatttaagtatcaaacaaatgaagattatgagaactacaatgctaacattatatttaccgaaaagaaaaatgattctaaaggtttagtaaaaggattcacagttgaagaacaagtaacagttgtaggtctttcatttaatgtagacgttgcaagatgtttggatgctgtactgaaaatgattttaatatctatgagagatagtatagaagagcaacaaacattccaattacagaatttgtctttggtgatattgcaccaataatagaagatggtgactcaatgattttttggtagaccaacaattattaagtacacaagttctctagatttggattatactattacacaagatattaataaactaacttttaaagaaagaaaggattggaagtaggatggctgaaaaaaagacacctgaaaataacactctaaatttaatggttatgttcatatagatacattccttgatactgcaaaagcccttttaatatgaaggattcacaagtagcaggatttaaagcttatatggaaggtagtcattatttgtttagtgagcaagaattcttaccatcattagagaagtatctaggtagggaaattagatatataataacattcagataaggagaattaaatatggcagtagaaccattcccaagaagacctattacccgtcctcatgcatctattgaagtagatacttcaggtatcggtggctcagcaggttcaagtgaaaaaagtattttgcttaatcggtcaggctgaaggcggagaaccaaatacagtttatgaattacgtaactattcacaagctaaacgtttattccgttcaggagaattacttgatgcaatagaattagcatggggttctaaccctaactatacagcaggacgtattttagctatgcgtatagaagatgctaaacctgcttcagcggaaattggcggattaaaataacatctaaaatctacggtaatgttgctaacaacattcaagtaggattagaaaaagaatacactaagtgattcattacgtttaagagtaatattcaagatgaccgtttcaatgaggtttatgataatatcggtaatatcttcacaatcaagtacaaggagaagaagctaacgcaactttctctgtagaacatgatgaagaaactcaaaaagcaagtcgtttagtattaaaagttggagaccaagaagttaagtcatatgatttaactggtggagcttatgactacactaatgctattattacagacattaatcaattacctgatttcgaagctaaattatcacctttcggagataagaacttagaatctagcaaattagataaaattgaaaatgcaaatataaaagataaagctgtatatgtaaaagcagttttggtgacttagaaaaacaaacagcttacaatggtatcgtatctttcgagcaacttaatgcagaaggagaagtaccaagtaatgtagaggttgaagcaggagaagaatcagctacagtaactgctacttcacctattaaaactattgaaccgtttgagttaactaagttaaaaggcggtactaatggtgaaccacctgctacatgggcagacaagttagataaatttgcatgaaggcggatactacattgttccattatcatctaaacaatcagttcatgcagaggtagcttctttgttaaagaacgttctgatgcaggagaaccaatgagctattgttggtggaggattcaatgaatctaaagaacaattgttcggtagacaagcatcattatctaatccacgagtatcattagtagctaactcaggtacttttgttatggatgatggacgtaaaaccacgtacctgcttacatggtagccgtagctctaggtggtcttgcaagtggtttagaaatcggtgaatcaatcacattcaaaccactacgtgtaagttcattagaccaaatctatgagtcaatagacttagatgaattaaatgaaaatggtattattagtatagagtttgttcgtaaccgtactaatacattcttcagaatcgttgacgatgtaactacattcaacgataaatcagacccagttaaggctgaaatggctgttggggaagctaatgacttcttagtaagtgagcttaaagttcaacttgaagaccagtttattggtactcgtactattaatacaagtgcttcaatcattaaagactttatccaatcttacttgggtcgtaagaaacgtgataatgaaattaaagacttccctgctgaagacattacaagttattgttgaaggtaacgaagcaagaatttcaatgacagtttacccaatcagaagcttcaagaaaatctctgttagcttggtttacaagcaacagacattacaacctagtctaggtgacggagtacctggattaggtactcctattaatataatttgaatactttaggagagtgaatacagatggcatcagaagctaaacaaaccgtccatactggtaataccgtcctacttatgattaaaggtaaaccggtaggaagagcacaatcagcatcaggtcaacgtgaatacggtacaactggtgtatacgaaatcggttctatcatgcctcaagaacacgtatacttacgttatgaaggtacaattacagtagaacgtttacgtatgaaaaaagaaaactttgcagatttaggatatgcttcacttggtgaagaaattttaagaaagacatcattgatattttagtagtagataacttaacgaaacaagttattatctcatatcatggttgctctgcaaataactacaatgaaacttggcagacaaatgaaattgtaacagaagaaatcgagtttagttacttaacagcaagtgacaaagcacgtacttaatagattagaccaactaaaagttggtctttttattgacactttaaaatttatatgttattataaatataataatttaaacaggagatgtactagatggcaaataagagaaaacaataggaaaaatgagtaacacaagagcaacatggaatattaatccggtaactaaagttaaaaaagataaaacaaaatattctagaaaaataaacataaaggtcttgacaattataattaactaaggtatattattagtataacaaaaaaaggagatgggtatatgagtacattttggtcagaaagaagaacaactaataaagataggcaagttaaaaaacattatactcaaatgagtatgtatgaaagaaagaaatgcagagttattacaagagacaattactgaaaatagaattattaattttacacgacatagtgcaaaaaaggttaaaggtaaaccaacaacaaatatacctaaattaataggttttatttttttaaaataagtttgcctacgaaaatatcatagagtacaataacacagattataatggtaatattgagaggagaattgttgttaaacatcctaaagttataactgtagaaggaaaacctagctatcagttttgacaattagtcttgaagatgctagagttattacggtgtggtataacagtgtagatgatacacatagaacactagatttaaattattatagtaaagacttgacaattcaataaggaggtattataatgggtataacaatagtaaatagttattttattctgtctagcattttcctcatcatattaaccatattaaaatggtaagggtacagttacaaggaatcattaactatgagtaaaatattagtagtaataacatcaattcaattttttagcatgtttaattattaatggtatttattggtcactaaaatttatgtagtagaactagaataaaagtattgacaaattaaaactaataaattataataaaggtataacaaattaaaggagaagatataaaatgtcacaagataaattaagagcaatttacacagaaatgaaagtagaattacacaaatttcctaaagaggtagatataacaagtaaatcaactgcaattgcaatcaatcagattttagataaattcaaaacattaacagaacaagcaggaaagattactagaaaatatttagaaggtcaagaaatattaactattgattatgagtattatgattcattacaagaatactatatttacctacttagaaatagtgaaaagattgaacaaagtttacaagaaattactaagcgtacaggtgaatatgtaaagtaattttgatttaaaaacaaaatatgatatactatgtttaaagtagtaagcctacactagtccgtgttatattaatattgaatcggataagcgtaggctttattaatatttaaaaaggaaggtatatcatattatggcagaaagaaattaaaaaggaacaagatgtacaagaaacaactaaagaagaaaaaaaagatgttagtaaaatgacaccggaagaaatagataaattaaaatatcaagacaaacaagaaaagaacaagttattaacaaagttattaaaggcgttaatgatacttgggaaaagaatataactttgaagaactagacttaagatttaaagttaagattaaattacctaatgcacgagaacaaggtaatatctttgcgttacgttctgcttacttaggtggtatggatatgtaccaaacagaccaagtgattagagcatatcaaatgttagctaccttacaggaagtaggtattgaagttcctaaggaattccaagaccctgacgatatttataacttatatcctttaactgttatgtatgaagattgccaggattcttaaactcctttcgttactaatagtatagaaacattagataaagatatagaacgattgggcggtatggaatcaattgttaaacaacctttatctagaaatctatgggctattatgaaagagtttaatgttttacctaccgagcaaagatttaaggacttagacgattatcagatagagtttattattgggaatatgaatagagatgtttatgaacataataaacaacttaaacaagctcaaaaggtggaaaattcgatagtcaattcgaagatgatgatagtagttggtggaatgaatctcatgaagactttgacccagtacctgatttcttagatgctgatgatttagcacaacagatggaagctaaattatccgatagagataaggaagaaagagctaagagaaacgatgcagagttaaatgatgaaacagaaggacttactacacaacatctagctatgatggaatacatcagacagaaacaacaagaattagatgatgaagtaggaaatggtaagactagtgaagatgacgctactatatcacaagatagcgttaataaagcactagaagacctagatgatgactggtatatgtaaagggtggtaggtgatactaccatccttatttttttaaaatggatggtgaataatgatggcaatgaatgacgattatagattggtcttgtccggtgatagttcggatttagagaatagtctaaaggcaatagaactttatatggattctttagagtctaagaatattgatgctcctttagataatttcttaaaaaaattaaaagtaattgctaaagaagttaaaatgtacagaacgcaatggataaacaagatggtaaatctgttatatcttctaaagacatggatgaatctattaaatccactcaatctgctacaaagaatataaatgaattaaagaaagctttagatgaccttcaaaaagagaatatatctaaaggtattgcacctgaccctgaagttgaaaaaagcatatgctaagatgggtaaagttgtagatgaaactcaagaaaaacttgagaaaatgtcttcacaaaaaataggttctgatgccagtattcaaaatagaattaaggaaatgaaaaccttaaatcaagtaactgaagaatacaataaaataagtaaagattctagcgcaactaaagattatacaaaacgattaagagctaatcgtaatatgactagaggttacatggagcgttcagaaggaacaggacgattaacatatgaccaaggtgcacgagttagaagtgagctaggtaaaataagttcttatgagagccaaagaaaacaaaaccaacgtaatttaggacaagcaagagagcaatatagcaactatagaaatcaacaacaagacttgactaaacgtagagctagcggtcaaattaataaggaacaatatgaacaagagttagcttctattaaacaggaaatgaaagctagagaagaacttatatctaactatgagaaattaggagcagaacttgataaaacagttcagtattataagggttcagttcaaaaggatttccaatctagagacgtagaccaacaaagaggaacatttggtagaatggttcaagaacgtttgccatctattggttctcatgctatgatgggtactacagctatggctacaggtttatacatgaagggtgcctcattaagtgaaactaatagaccgatggttacatcattaggtcaaaattccgataatatggatatagattctgtaagaaatgcatatggagacttgtcaattgataacaaattaggttataatagtactgacatgttgaaaatggctacttcatatgaagcatcagtaggacataaaagtgatgaggacacaatggcaggaactaaacagcttgctattggaggacgttctttaggcattaaagaccaagaagcttatcaagagtctatgggtcaaatcatgcataccggtggagtaaattctgataacatgaaggaaatgcaagatgcattcttaggtggtattaaacaatcaggcatggttggtcgtcaagatgaacaacttaaagcactaggttctatagcggaacaatcaggagaaggaagaactctaactaaagaccaaatgagtaaccttactgccatgcaatctacttttgcagagtcaggaagtaaaggattacaaggtgaacaaggtgccaatgctattaacagtatagaccaaggacttaaaatggtatgaatagttcttatgctcgtatagcaatgggatggggaacgcaataccaaggtcttgaaggtggatatgatttacaaaaaaacgtatggatgaaggtatatctaatcctgaaaacttgacagatatggctgatatagctactcaaatgggtggcagtgaaaaagaacaaaaatacctatttaatagaagtatgaaagaaataggcgctaacctaactatggagcaatctgatgaaatatttaaagatgctcaatccggaaaactatctaaagaagagttagctaagaaagctaagaaaatggaaaagaaggtaaaaaagaaggagaagataacgccactgattataaagaatctaaatcaggaaaaaatgaccaaaataaatcgaagactgatgataaagcagaagatacttatgatatggctcaaccactaagagatgctcatagtgctttagcaggtcttcctgcccctatatatttagctatagagctataggagcatttacagcttcactaattgcatctgcaaagtcaatttggagcaggtcacttaattggtaaaggagccaaaggacttagaaataaatttggtagaaataaaggcggtagctccggtggtaaccctatggcaggtggaatgcctagtggtggtggttcacctaagggtggaggctcacctaaaggtgggggcactcgttctactggaggaaaaatacttgatagcgctaaaggtcttggaggattcctagtaggtggcgcaggatggaaaggtatgtttggcggggagtctaaaggtaaaggctttaaacaaacatctaaagaagcctggtcaggtactagaaaagtatttaatagagataatggtagaaaagccatggataaatctaaagatatagctaaaggtaccggtagtggtcttaaagatatctataatgatagtatatttggtaaagaaagaagacaaaacctaggagaaaaaagctaaaggttttggtggcaaagctaagggtctctatggtaagtttgctgataagtttggtgacggaggtaaaaatggtattctttcacaatcaccaaaagcaggtggaagtggcatagggaaacttggaaaacttgcaggtggacttggaaaaggagccggagttttaggtgttgctacgtctgccttatcattaatacctgctttagcttccggagatagtaaagctatcggcggaggaataggctctatgggtggaggaatggcaggtgcatcagcaggagcttctataggagctttatttggtggtgtaggtgcaatacctggagctttaataggtggagctataggttccttcggaggaggagctgttggtgaaaaagtcggagacatggctaaaaaagctaacactaaagaaggatggaacctaggatggactaacggagataaggatggtaagaataaattccaagattctttattaggaaaacctatattcaaagcatggagcggtataacaggtctctttgataatgacgctgaagcatccgaagaagatagtaaagataagaaaaaaaggtgttaaaggcgttaaaggagatactaagaagaaagaaaaatgacagcagaacaacttagagaaaagaataaccaatctgaaactaagaatcttaaaatctatagtgatttacttgacagagctcagaaaattattgagagtgctaaaggtattaatatagatggaggaacttctgatagtggttctgatagtggaggctctgcatctgatgtaggtggagaaggcgcagagaagatgtacaagttccttaaaggaaaaggactatctgataatcaggtaggagctgttatggggaacttacaacaagaatctaatcttgacctaatgctaagaatgcttctagtggagcatttggtattgctcagtggttaggggctagaaaaaacaggattagaaaattttgctaaatctaaaggtaaaaaatctagtgacatggatgttcaattagattacctatggaaagaaatgcagtctgattatgaaagcaataatcttaaaatgcaggttggagcaaaggtggaagcttagagcagaatacaaaagcatttgctactggatttgaacgtatgggagcaaacgaggctatgatgggtactcgtgttaacaatgctaaggaattcaagaagaaatacggaggctccggtggcggaggtggtggaggagccctatcctctacttaccaagaagccatgagtaatcctgtattaactactggttctaattataggggctctaatgatgcttctaatgcttctacaactaacagaataacagtcaatgttaatgttcaaggtggaaataatcctgaagaaactggagacattatcggaggaagaattagagaagttctagatagtaatatggatatctttgcaaatgaacataagagaagttattagtaattttgtattgacacaagagtagtatcataatatactactcttatacatataaaaaaataaaaggaagtatgtgtatatgcgtagaataagaagacctaaggtaagaatagaaatcgttacagatgataatacatttacattgagatttgaagatacacgtgactataatggtgatgagtttggagctaaacttttaggattccaaactaaaactctatggaagatgatagttcagttttccaaataaatatggcaggagatacttattgggataagctagttatggctaatgatatcataagaatatttattacacctaatgatgaccctaacgataaagaaggaaaacaagaacgacttatcaggtaggtatggtttctcaagtatcaaagtaggtagttacggtaatgaccaaactcaatttagaataacaggtcaatctttgtaaaaccttttatgaaatttggattaggcgttattcaggaagttcaagctgtattacctgaagtaggttggcttattgatggtgatggagataatgaagtaaaatttactggtagctcagctcatgaagtaatgactggtattatacgtagatttataccttatatgaaatataactatactgaaaaacatataatacaattgataactatcttgattatgatgatttaagtagttgggatgagtttgaaaacttacagaagtttcagcctttactaattttgatgggtcattaaaacagttaatggatatggtaacagctagaccttttaatgagttattcttcaaaaaattcagaaaaaaacacctggaaaggctcaacttgtattaagaaagacccctttaatcctactgagtggagagctttagatatgattaaagtacctactgaggattttatagaagaggatgtaggtaaaagtgatgtagagacatattctatatttacagcaacacctgcaggtatgttgaaagagcttaacggtgatgtattttctaaaccacaattccaccctgaattaactgatagatatggttatactaaatttgaagtagaaaatatttatcttagtacaaaatcaggttcagctactgaggattcagattcttcaggtgatgataatggcacagaacgaggaacttattctaaaattatgaaagatttaagtaactatggaagagataatatatctaaaaggtatagataagtatacaagtaaattatcttcaaaatataaaacttaaaaaaagcccaagctaaaaaaattatagagaagtttgttaaagaaggaaaagtaacagaaaaagaatatgaaaaaaataacaggtaataaggtagatgatgaattaacatcagataacagaccgaagttgacaaaagataaattaaagagtatactaaaagaagtttaaaacacaagatgattttaataattctaagaaaagaaaagctaagacagatgcacttaaagaattgacaactaaatatcgttttggtaataaaacacatgctacaactttattagatgaatatattaaatataaaggagagccacctaacgatgaggcttttgataaatatcttaaagctattgaaggtgttagtaatgtagctacagacacaggttcagatgcaagtgatagccctttagttatgttttctagaatgctatttaattggtatcatggtaaccctaacttctatgcaggagatattattgttttaggagaccctaagtatgacctaggtaaaagattatttattgaagataagcaacgaggagacacttgggagttctatattgaatctgtagaacataaattcgattataaacaggggtattatacaactgtaggagtaactagaggtttaaaagacgctattctagaagatggtaaaggtagtccgcatagatttgcaggattatggaatcaatcatcagacttcatgggaggtcttatgggtgaagatacttctaaagaacttaaagaaaaggtgtagcagagaaacaaagtagtggagataaagatggtggttctgatagtggtggagctcaagatggtggctctttagattcacttaaaaaatataacggcaaacttcctaagcatgacccaagttttgttcaacctggtaaccgacattataagtatcagtgtacatggtatgcttataatagaagaggtcaattaggcatacctgtgcctttatggggacgccgccgactggataggtggtgctaaaggagcaggttatggtgtaggtagaacacctaaacaaggtgcttgtgttatatggcaaagaaggagttcaggaggtagcccacaatatggtcacgtagcgtttgtagagaaagtattagatggaggtaaaaatatttatctctgaacataactatgctacctaatggatatggtactagaacgatagatatgagttcagccataggtaagaatgcacaattcatttacgataagaaataaaggaggatagtctatggcaacagataaagaagctaaagatgttattgataaatttatagacaatgtatttaattttgatgtacttacaaaagaaagaataaaagaaaaaagatgaagaaattaaaaaaataactacagatgatatgtatgaaaaggttgtgtatatacgaccttatgttggagtaatacaaagccttaaccctcagcatgttcagtatgaatcattttctaataatggttatgatatagaggcagaattaagtttcaggaaagtaagttatttagttgataaagggtctatacctacagattctttatctactttaacagttcatttagtagaacgaaatcaagaactattaatagattactttgatgagatacaagatgtgttgtatggagaatatatggaagaagaatatgtatttgatgaagatgtaccattaagtacgatactagcattagacttaaatgataatcttaaatccttatcaaatataaagtatatgttcaaaggtgctcctaaagagaatccatttggaacagataaagatgtttatatagatacttataacttattatactggttatatttaggtgaagatgaagagttagcatatcctatgaatattaactacttctttacagagggaagattctttactatattcggtaaaggacataagtataaggtagatgttagtaaatttatagttggagatatattattctttggtagaagtgatactaatataggtatttatgtaggagatggggagtttatatctatgatgggtaaattcccctaaagatgaaacacctataggaaaatataaacttgatgattactggaatgaatttaacggaagagttatgagattcgatgaagaggtgtatatttaatggtagtaagattccaatcttccatggggagaagtttaaaagagtagattcggatgatttaaatgtaaaaggattagttttagctacagttagtaaaattaattataaatatcaatcagtagaagttaaagttaacaatttaactctaggaagccgtataggtgatgatggtagcttagctgtaccttatcctaaatctttcataggaagaacacctgaaggaagcgtattcggtacaaaacctcttattactgaaggttctgtagtattaatagggtttctaaatgatgatataaatagtcctattattttaagtgtttatggtgataatgaacaaaataaaatgattaataccaatcctctagatggaggtaagtttgatacagaaagtgtttataaatatagtagttcactatatgaaattttaccatctttaaattataaatatgatgatggagaaggaacaagtattagatctataatggtaaatcattttctctatgacatcaggtgaagaagagaaacctcaggcaacagattttatactgaactgagtatcaagatttatttacttcttattatggtaataagacattaattgagcctagaatacaaaaggctcctaatatgttatttaaacatcaaggagtttttatgatgatggcacgccggataatcatataactactttatttatatctgaaagagggatataagagcctcagttttaaatacagaaacacagaaaagaactacacaggaaatgtcaagtgatgggtcttatagagttatcaaacaagatgacgatttaatgttggatgaagctcaagtttggattgagtatggtattagtgaagataataaattttatattaaaaatgacaagcataaatttgaatttactgatgagggaatctatatagatgataaacctatgttagaaaacttagatgagagtatagcagaggctatgaagaatttgaatgaaatacaaaaaagaactcgatgatataaactaccttcgagggtgtaggtaaagacaatttagaagaattaatagagtctacaaaagagtctatagaagcttctaaaaaagcaacttcagatgtcaatagacttacaactcagatagcagaagtgagtggtagaactgaaggtattataacacagttccaaaaaaatttagagatgagacttttaaagatttttatgaagatgcttctgttattaatgaagtaaatcagaatttccctactatgaaaacagatgttaagaccttaaagactaaagttgataacctagagaaaactgaaataccaaatattaaaactagattaacagaactagagaacaataataacaatgctgataaaataatctcagatagaggagaacatataggtgctatgatacagttagagtgaaaaatgtcacagtacctatgagaaaatatatgccaataccatggagcaaagttacttataataatgcagagttttgggattcctaataatcctactcgattagtagtaccctaaaaggaataacaaaagtaagagttgcaggtaatgttttgtgggacccctaacgccacaggacaacgtatgttgagaatattgaaaatggtacttatagtataggattaccttatacaagagatgtagctatatctacagcacctcagaatggtactagtggagttattcctgttaaagaaggagattactttgagtttgaagctttccaagactcagaaggtgacagacaattcagagcagacccttatacatggcttagtattgaagctatagaattagaaactgaaactatggagaaagactttatgcttataggacatagaggagcaaactggatacacagatgagcacacgataaaaggatatcaaatggctttagataaaggtgcagattatatagaattgatttacaattaacaaaagataataagttattgtgtatgcatgattctactatatagacagaacaacaacaggaacaggtaaggtaggagatatgaccttatcttatatacaaccaatccttacatctctcaatggtgagccgataccatctcttgatgatgtactaaatcattttggaacaaaagttaaatattatatagaaactaaacgtccgtttgatgctaatatggatagagaattattaactcaattaaaagcaaaaggattaataggaataggttcagagattccaagtaattattcaatcatttgctagagaatctttaattaatattcataatcaattctctaatatacctttagctacctaacaagtacattttctgaaagtgaaatggatgattgtttaagttatggttttatgctattgcgcctaaatatacaactataactaaagaattagtagatttagctcatagtaaagggcttaaagtccatgcatggacggtaaacacaaagaagaaatgcaaagcttaatacaaatgggtgtagatggattctttacaaactacctagatgaatataaaagatttaatattaaagacctattaatttaggtctttttttttagttgtaatttaaactagttcgtgatatattagtagtatgagatttatatacatgctgaaaaggagaggataaaatgccacaatcagatggaataagtaatcttcatagaatagctttacgcttccctaaagaaggcggtggttatgatatgtatagatttaaagttaaccctgagaactacacaatagattcaccacaacgtacgacagcaattaaaacaaaatcagatattgtaatagaagattatggtaaagacatagaagttattaacttcacaggtacaactggttttagacctgttagagaagcagatggattaaaacaggtaagcagaaaatggaagagttacaaagtagagttagtgaatatgctatgcaaggtggcagtggtaatgtaagtggttcttacttacaattttttaactttacagatgatagttattataaagttcatttagctcctcaggggttaaagataactaggtctaaagatgaaccattactttttagatatgaaataacattagtagttattggttcattaacagaagcagatagaagtgctgtaacaacagaagagtttggtaacgttaaacctaatgcttctcaaagagtagatgagggtataaaagaattagataaaatgctcgtaaaacgagagatagaaacaatcaagaaatatctagaagagaaaatacaatacctaaatctacaggagataatacgaacgagggtaatagacttaagcaaagcttccctagttctatatataatcctagacaatctactaacggattaaaaggtaatattgacaatatggcgctgataataggttacggtgatggaggtgtatctagctaatgaataattttataccacaacctcaaggtctacttagattttaaatgccctagatacagatttaacttcttctcatatgaatttactggatgaagaggtatcatttgtatctaaattttatacaccacagctacaattaagtgaattagcaaaaaaagtattgacaaatataaagacagatgatatacctgtattagaaagagaatttaatgataatacaattatccataaagctaacgatacattactaaagtacaggctccaagaatgtatatgattctacagtcgattgtacttgaagcatatgctattgttaattgctttgtagaaaatccgagctctttaaaatacttaactgaagaagatgttagtataacacggaaaattttaaattatgtagctgactacttaggtaactatgatgactataatagtgttgtcttagacttaagagatttagacttatgttttagtgctatagaattacaattacctctaatcaaaaggaggctaacgtataatgagatttaagaagcacgtagttcaacatgaagaaacgatgcaagcaatagcacagagatactatggtgatgtgagttattgatagacctagtagagcataataatttaaagtaccctatttagtagaaactgatgaagaaaaaatgaaagaccctgaacgattggcttctacaggtgatacactgattatacctatagaatctgatttaacagatgtatcagcaaagaaattaattctagagataaagatgtactagttgaattagctttaggaagagatttaaatattactgcagatgaaaagtattttaatgaacatggtactagtgataatatactagcattcagcacaaatggtaatggagatttagatactgtaaaaggcatagataatatgaaacagcaattacaggcacgtttattaactcctagaggttctttaatgctacatcctaattacggttcagatttgcataatttatttggtcttaatatacctgaacaagctacattaatagaaatggaagtattgagaacattaacatcagataatagagtaaaatctgctaatctaattgattggaaaattcaaggtaatgtttattcaggtcaattttcagtggaaataaaatctgttgaagaatcaataaattttgtcttaggacaagatgaggaaggaatttgctttatttgaataggaaaggattaaattatgaaaactagaaaattaactaacatactatcaaaattaatagataagacaatggcaggtacaagcaagataacagactttactcctggttcagcttctcgttcattattagaagctgtatcattagaatagagcaattctatattctaacaaagaaaatattgattggggtatacaagaaggtatcattgaagcttttgattttcaaaaagacaatctaaaagagcttatggtgatgttactattcaattctaccaacccttagatatgagaatgtatatacccgcaggaacaacttttacttcaacacgacaagaataccctcagcaatttgaaacattagttgattattatgcagagcctgattctactgagattgttgttgaagtttattgtaaagaaacagggttgcaggtaatgttcctgaaggaacaattaatactatagcatcaggttctagtttgattagaagtgttaataacgagtattcttttaatacaggaactaaagaagagagccaagaagactttaagcgcagattccactcttttgtagaatctagaggtagagcaactaataaatcagtaagatatggtgcactgcagatacctgatgtagaaggtgtttatgtttatgaagaaacaggacatattacagtattatttgctcatgatagaaacggtaatttatcagatgataccttaaaagaagatataattgatgctttacaagactatagaccaggaagtggtataatgttagatgttaggtgtaggaaaagaagttaatgtttctgctacagtaactatatctaataaatctagaattggtgatacattacaaaaaacatatcgaaagtgttattagaagctatttaaataatttaaaaacttctgatgacctaataattacagaccttattcaagctataatgaatattgatgatgtattaatatatgatgtgtcatttgataacctagatgagaacattatagtgccgccacaaaggaattattagagcaggagaaataaaagtagaactaaagtaaagagaggtgaaacttaagtcgtggctaattttttaaagaatcttcatccattattaagaagagatagaaataaaaaaagataatcaagaccctaactttgctctgatagatgcactcaatgaagagatgaatcaagtagagaaagatgctatagaaagtaagttacaatcttctctaaagacatctaccagtgaatatttagataagtttggggattggttcggagtttatcgtaagaccgatgagaaagatgatgtttatagagcaagaattataaaatatttactcttgaaaagaggaactaataatgctataatagatgctataaaagattatttaggtagagatgatattgatgtaagtgtatatgaaccttttacaaatattttctatactaacaaatcacatttaaatggtgaagaccacttaatgggatactattatagatttgctgttattaatgtctctataggtgattatttccctgtagagattatagatgtaattaatgaattcaaacctgcaggtgtaactctatatgtcacttatgatggggcttctactattagaggtggagcaattattaagtggttagatgggttacctaaaatagaaacataccaagagtttgatagatttacaggttatgatgatacattctatggtcatattaatatgaatcaaagtaaagatactgataacagttcatcagatattttttaaaacaaaccatagcttaattaatagtttagatgttttaacaggttcatctagtgtagggagacagtatattaactacggatatgtaacatcatatgtttataatccaggtatgacatcttctgtaaatcaaataagcgctagtacaaaaggtagaggtcaagaagtacctactgactattatatgtatactagtactaagaataacaatacagtagaacttagtatgcaaactacttccggtgtgtcttatttatataataactttaattttagggactatatgagtaaatatagacctcaagtagatttacaatctgatgaggctagaaaagaattgtatctgattatataaaagaattaagtattgattactatcttagtgctgtgatacctccctgatgaaagtatagaaattaaactacaagtttatgatttttctattaatagatggcttacagtatcaattaataatttatctttctatgaaaaaaatatcgggagcaatataggatatataaaagattatctaaacagtgaattaaatatgtttactaggttagagataaatgcaggtaaaagagattcagtagatattaaagttaattacttagatttaatgttttattactatgaacgaggtatttatacaataaaaccgtataaagcattaatagaaaattatttagatatatctagagagacttatgtagaagcatttaaaatagcatcattatctaatggagatattataactaaaacaggttttcagcctatagggtatttaaaactagttggtaattatgaaaatacaatacctagcacaataaatatagtagctaaagatacagataataaccctatagaatctaatgaattagatgtatataatacagtagagaatagaaatttattacaatcttataaaggtgtaaatacgatagctagagaaataacttctacaaaagagtttactgtatcaggatgggctaaagagatatactcaactaattatctttctaaagtattaaaaccaggtaaagtgtatacgttatcttttgatatggaaataacaggtaatgacccaactcttaaatcttattctgatagtcatggtatatatttatacagtaatactaagggaattgttgttaatggtgttaaatctatggaacgtactataggtaacaaagtatccgtaactcaaacttttacagcccctactattactgaccatagattactaatatatactggaagatatacatctgatggtaaagcatcaactcctccagtgttctttaatacagttaaaattacggaattaaaattgactgagggttcttctaagctagagtactcacctgctccggaagataaacctaacgtaatagaaaaggaattaaatttaataatatcctaactaatatacagactttaagtattaattcggatactatcttaaaaatgtaacttttatattattcttactatggtgatagttgggtagaactaaagactctaggaaatattagtactggagaaacaacagaaaccaataacttaatagatttatatggattacagacagtagattattctaatataaatccaatgtctaaagtatcattacgttccatttggaatgttaagctaggtgaattgaacaatcaagaaggttctttatataatatgcctaatgattactttaatgctgtatggcaggatatagataaattatcagatattgagctaggttctatgagaatggttaaagacactgagggcggagtattcgatggagctacaggtgaaattattaaggctactctatttaatgtcggtgcttatactgatttagatatgttatttatgcttttgactaattatactgaaccgttaacgttaggctctagtcgattaataattgagctagaagaagaactactaacatcagaatcatttaatgtcgataatagaattaaagtaattgactcaatatgaggagttaccaaatacaagcattattaaaaatagtttgttgaaaagttacaggttctaaatatttagattacggtttatatgagcctatagaagatggtactagatataaacttattgtcgaaggagaatttaaagataatatagaatttatatctttatacaattctaaccctaactttaatgaaacatttatatatccatcagagataattaatggagctgttgaaaagaatttattgcaaaaccatctactgaagacaaaccaaggttaaatacagatgttagaatatatatacgaccttatgattcaactatctctaaagtaagaagagaattaaggaaagtttaataaataagttgacagaaagttaataatatggtatacttataaagtaatatttagtgggtataccatgttatattaataaagaaaacaacagatgaaaggaattaaaaatatggcaattgcaacgtataattctcatgttgagttagcaaatatctagttagtgttgattcagtttacttaacaattgaaagagcacaccgtggtctaatgaaacaaacccaccgcaacctgatgaaaatgcaacagtattacaggaggttattgaataaaaaagctactaaagttactttagttagacctctaaatcacctgaagatgataataaatttaatttcttatggtaatggcaaatcgtgggtagaagtaacacctgaaaaatgctaaagctgaaggctaaataggttttacttagaaagtagtattgttggtgacgaactacctcttggaacatatagacaagtaggatttgttatggacctctagtagcaaaagtattagtaaatttaacttagtacctagtgaagtagaatcaactggaacattattattctttgataataaacaattcaaaatagaagtgagcagacaactgctaaagaaagatttattgtagaagtttaaagaaagggagataattctaaatggcaattaattttaaaggttcacctttatttagatttgacccgtctaaagatagaacaaagtattatttaatcctgatagacctctacaacaggcagaattaaatgaaatgcagtctatagaccaatattatttaaaaaatctaggagacgctattttaaagacggagataaacaatcagggcttggattcacattgtctgaagataatgtattgacagtaaatcctggttatgtatatatcaatggtaaaataagatattacgataatgacgattcagttaaaataactggcgtaggtaaagaaactattggtattaaattaacagaacgtattgttacacctgatgaagatgctagcctattagaccaaactagtggagtaccaagttacttctctaaaggtgcagatagattagaagaaaagatgtcattaacagttaatgacccgacatcaacaactatttatactttcatggatggggatttatatattcaatcaactaatgctgagatggataaaatcaacaaagtattagctgaacgtacttatgatgagtcaggttcatataaagtaaatggttttgaactattttcagaaggtaatgctgaagatgatgaccacgtttctgtagttgtagatgcaggtaaagcctatgtaaaaggttttaaagtagacaaacccgtatcaacaagaattagtgtacctaaatcttatgacttaggaacagcagaaaatgaaagtactatctttaataagtctaataactctattattttagctaatagccctgtaaaagaaattagacgtgttacaggtcaagtacttattgaaaaaaaaagaacgagttacaagaggagctcaaggtgatggtcaagattttctttcaaataatacagcatttgaaattgtaaaagtttggactgaaacaagccctggagttactacaaaagagtataaacaaggagaagacttcagattaacagatggtcaaacaattgattggtcacctcaaggtcaagaaccttcaggaggtacttcatactacgtttcttataaatataacaaacgtatggaagccggtaaggattatgaagtaacaactcaaggtgaaggttagtaagaaatggtacattaactttacaccttcaaatggtgctaaacctattgaccaaacagtagtattagtagactatacttactacttggctcgtaaagattcagtgtttattaataagtatggtgatattgcaatattacctggtgaacctaatattatgagattagttacaccaccattaaacacagaccctgagaatttacaattaggtacagttacagtattacctgattcagatgaagccgtatgtatttcatttgcaatcactagattgtctatggaagacttacagaaagttaaaacaagagtagataacttagaaggtataaccaagcggtaaatgctctagatgatggtgctatggaaggacagaaccctctaacattacgttcggtattcagtgaaggtttcattagtcttgacaaagcagacattacacatctgacttcaggttgtatttagttttgaagatgaagctactctagcttatacagaagcagttaaccaacctaagattattccaggagatacaacagctcatatttggggtagattaatttcagcaccatttactgaggaacgtacaatctaccaaggtcaagcatcagaaacattaaatgttaacccttataatattcctaacaaacaaggtgtgttaaaattaacacctagtgaggataactggattgatactgaaaatgttacaatcactgaacaaaaaactaaaaagtaactatgaaacgattttggagacataatgaaagttactatggtgagactgagcattacttgtattctaacttacagttagatgcaggacaaaagtggaaaggtgaaacttacgcttatgatagagagcatggtcgtaccggtactttattggaatcaggaggacaacgtactctagaagaaatgattgaattcattagaatcagagatgtatccttcgaagttaaaggactaaaccctaatgataataatttatatttattatttgatgggtaagatgtgctataacacctgcaactggctatagaaaaggctctgaagatggtacgataatgacagatgctaaaggaacagctaaaggtaagtttactattcctgcaggtattcgttgtggtaaccgagaagttacacttaagaatgctaactctacaagtgctacaacttacggccaaggacgtaaaaccgctcaagatattattatcagaactcgtgtaacagtaaacagtagaccgttagcacaatcattccaatatgatgagaatagaactatatcatcattaggattatactttgcttctaaaggtgataaacaatctaatgttgttatcaaattaagtatgggtgaccaaggttatctaataaaacaatctatgcagaaacagttatgaatgctgatgatattaaagtatctaataatgctagtgctgaaactagagtatactttgatgacctatgatggctgaaggcggtaaggagtacgctattgttattattactgagaacagtgattatacaatgtgggtaggtactagaactaagcctaaaattgataaacctaatgaggttatttcaggtaatccatacctacaaggtgtattattcagttcatcaaacgcatcaacatggactcctcaccaaaactctgaccttaaatttggtatttatacttctaaatttaatgagacagcaacgattgaattcgaaccaattaaagatgtatcagcggatagaatagttcttatgtctacgtacttaactcctgagagaacaggatgtacgtgggaaatgaaattaattctagatgatatggcatcttctacaacattcgaccaattgaaatgggagcctatcggtaactatcaagacttagatgtttaggtctagcaagacaagttaagttaagagcaactttcgaatctaatagatatatctcaccattaatgagctctagtgatttaacattcactacattcttaacagagttaacaggttcatatgttggtagagctattgatatgacagaggctcccttgtacggtaagactggggttgcttgactttcttacctaaaaggtactaaggattcctaagtattctgcggatgatggaaaaacttggaaaacatttacctaaatcccctacagctactagagccaataatgagtttattaatgttatgtcattgacgagaaagtaaaatcatcaggaacaaatactaaactacaagttagattagatttatcaactgaaaatagcttttttacgtcctctcgtgttcgtagacttatggttactactagggatgaataaactagagggttgattgacccctttatttaataaggagagatttatatgcctagagaagttagagacccttattctcaagctaaattatttatacctacagttgaggaaaaaaccaattaaggaattagaaaacatacaaagaaaaaaattgatgaagctactaagttaatcaatgaattaaagaaagagagaggagaaaaatagatggcatttaactacacgcctcttactgaaacacagaagttaaaagatatgtatcctaaagttaatgatataggtaacttttaaaacagaagttaaccttagtgatgtaaaacagatatcacaacccgactttaataatattttagcatctatacctgatagtggtaactattatgtaactaattcaaaaggtgctcctagtggagaagctacagcaggatttgtaagattgataaaagaaatgtaaattattataatttaatattcaccatagcagtaacaaaatgtatatcaagacttcttatgctaatggtactgtggtatatgattggattagttttttaaattagatgacagaagcttatacaatgaaggtaatactttgaatgtaaagacactgaatccacaactcaatatgcaacactgattaatcctcaaagaacttaagctgggttgggttaattacaaagaagtaaaaatggtgtttcttctttgatgaatttaacccggttaactccacttcaacttttaagatgataagaaagttaccagtacaagaacaaaagcctaacttattgaaagatagtttatttgtttatcctgaaactagctattctaatattaaaacagataactgggatacgcctccattttggggatattcttctaatagtggtcgttcaggagttagatttagaggagagaatacagtacagatagatgatgggtctgatacgtacccttcagtagtttctaataggtttaaaatgggtaaagaactttctgtaggtgatactgtaacggtatcagtatatgctaaaattaatgaccctgttttacttaaagataacttagtttactttgaattagcaggatacgatactgtagatgatactagtaaaaaatcccatacaggaggacgtagagaaataacagcaagtgagataacaactgagtggaaaaatactctttcacattcactatacctgaaaatacaatcggagcatcaggcgttaaagttaattacgtatctttactactaagaatgaattgttcatctagtaaaggtaatggtgctgtagtatactatgccttacctaaattagaaaaaatcatctaaagttacaccatttattacacatgaaaatgatgttcgtaaatatgatgagatttggtctaattggcaagaatttattagtaaagatgaattaaaggtcactcccctgtagatattgaatataatgattattttaaatatcagtggtggaaatctgaagttaatgaaaagagtttaaaagatttagctatgacagtacctcaggatatcatacattttgtgtcaaggctgtgccgggacgcctaagggacgttctattagaggaaccattcaggtagattatgacaaaggtgacccatatagagctaataagtttgttaaattattgtttactgacacagagggtattccttacacattatattatggtggttataaccagggttggaaacccttaaagcaatcagaaacttctactttactatggaaggtactttagattttgggtctacggaagctgttaacttaaatgactcattagataattacgatttagtgaggtaacttattggactcgttcagcaggacattttctacaaaagattagatataaaaaatacatcaagtttactgtatattagagattttaatatttcaaatgatagtaaaggttctagtgtagacttttttgaagggtattgcacttttcctactagaacatcagtacaacctggtatggtaaaatctataactttagacgggtctacaaatacaacaaaagtagcatcatggaatgaaaaggaacgatataaggtatacaatattatgggaattaatagaggataaagaaagattgagtcaaaaaaaactatggctgttaaatatgatataggtaataatgagatagtattaatatttaagagaaggtaaatatataacagggtttacaacagtaggagggtatgataaggagttaggacaagtaaaagttaatagaaatcttacctgcttacttctttgataattttgcctatgaaagatatttgtattatagtaaacctgaagaggttatagaaaataaaactatgtaccaccacaaatcaatgatgatgatgaggaatcccaacaaattactgtacctaaagaacaatatgatagtttaaaagaagaactagagcttatgagaaaacaacaagaagctatgatggaaatgcttcaaaagctcttaggtcaaaaggggtaattataaatggcggtaaattttactacaataacggaaaaggcaatggtattagagacctgactactcaggtcaataacattggagaagaattaacaaagaaagaaatatatttgacattaccgatgatttagtttataattttaataaatcacagaaaattaaactaactgatgataaaggattaactaaatcttagaaacataacagcccttagagatataaagaacctggttattactatataggtgctagaacattagcaacattattagatagatcccgatatggaatctctgatgttgttttacatgtagtacctcttgatacttctagtaaggtagttcaacatttatataataattcatctactaacaataaccaaattaaaatgttatatagatttgtctcaggaaactctagttcagaatggcaatttattcaaggattacctagtaataaaaaatgttgttatatcaggaactaatattttagatatagcttcaccaggtgtttactttgttatgggaatgacagaggaatgcctagtggagtaagctccggatttttagacttaagtgtagataatgataatagattagctagactaactgatgctgaaaccggtaaagaatatactagcattaagaaacctacaggaacatacacagcctggaaaaaaagaattgagccaaaagatatggagaaatatctactaagtagtattagagacgatggtagtgcatcattcccactcctagtttatactagtgatagtaaaacatttcaacaagctattatagaccatatagatagaacaggtcaaacaacctttactttctatgttcaaggcggtgtatccggttcccctatgtcgaatagttgtcgagggttattcatgtcagacacacctaatacttctagtttacatggtgtttacaatgctataggtacagatggtagaaatgtaacaggttcagtggtaattggacttcaccaaaacatccccttctcataaagaattatggacaggagcacaatcattcttatctacaggaactactaataatttatcagatgatattagtaactactcttatgtagaagtttatactacacataagacaacagagaagactaaaggtaatgacaatacaggaactatatgtcataagttttatttagatggtagtggaacttacgtttgttcaggtaatatttgtttccgggatagaaccgatacaaaacccctatcacggagttttatagagtaggtatcttttaaaggttctacatggactcttgtagatagtgcagtacaaaatagtaaaactcaatacgttacaagaattataggtattaatatgccatagaccaggagaaatttcagtcttttttttcttgacttgaaaaggattctgtggtatactataactcgtgtaaggatataaggagattaaaatgagattaagaattaagaacttatatacctatgtagaatttgaggaggatgataaatacttaaaaaagatattttaaagagagtccatacgactataggagcaagagaagaaggatttcagtacagccctgcgtacaaaagaggtagttggatgacatgtagattttatgtttatgaggaagataaattccccactggacttttatttaaaattgagttattattaggtgagctacaatcaaggtataatttccagtttgaaacaattgatgagcgtgatgaaagtttcttatctggaagaagatattgatgatgagataacattgcttgataataatgtcggtcaaattaccttaagagattaccaatatgaagcagtgtacaatagcttaacatttccacaacatattgctcacttagctactaatggtggtaaaactgaggttgctagtggtattatagaccaattattacctcaattgattagaaaaaggtgagagagtagcattcttcacaggctctacggagatattccatcagtctgcagataggcctaagatgtttaaatattcctattggtaaagtaggtgcaggtaagtttgatgttaagcaggttacagttgtaatgatacctactttaaatgcaaacaagactaacacaaaggggtaaaaggttacgcctaaacaaaatattagtaaaaaaagattgctcaagagatattacctaaatttgaaggtggaacaaatcaaagaaattactaaaagtattacttgataacacaacacctaaaacaaaagtagaacaaaatgtattaagtgccttagaataatttaccaaatagtaagacagatgcagaagttttattaaacttaagaaatcataatgcacattttcaaaaaattgttagagaaagaacgaaaagaaatatgataaatatcaagatatgagagatttttttagactcagttacagttatgatagttgatgaggcacaccattctaaatctgattcttggtacaataatttaatgacatgtgaaaaaagctttatcgaattgcattaacagggtctatagataaaagatgaattactttggatgagattgcaggcgctattcggtaatgttattgcacgaactactaataagttttaattgatgaaggtcattctgctagaccaacaataaatattatacctgtagctaatcctaatgacatagatagaattgatgattatagggaagcttacgataaaggtataacaaataatgattttaggaataaacttattgcaaaactaacagaaaagtggtataatcaagataaaggtacattgattattgtaaacttcattgaacatggagacacaatatcagaaatgttaaatgatttagatgtagagcattacttcttacatggagaaatagactctgaaactaggagagaaaaaattaaacgatatgagaagtggtaagcttaaagtaatgatagctacatcacttattgatgagggtgtagatatatcaggtattaatgcactaatattaggtgcaggaggtaagtcattaagacaaacattgcaacgtattggtcgtgctttacgtaagaaaaaaagacgataatacaacacaaatatttgattttaatgatatgacaaatagatttttatatactcatgctaatgagcgtgggaaagaggttgaaggaagattttgaaataaagacttaggaaaataggagggtaagagatggcaacaaaacacaaagaaagctataccaatatctagaggaaaatgctacagaaaataaatttcatatttctactaagaaagagctagcagattctctaggtgtttccatctctgctttatccaataaccttaaaaagttagaagaagaaaataaagtcgttactgtttctaaaagaggaaaaacggcgggtaataataactttagttagagagtatgacacagaagaattgaagaattcaataattctacagataatattattacttccgatttacagtatgctaaggcattaagaagaaagcacttcccttcttatagatatgagagaaaagaacaacgtagacgtactaagatagaaatggcacaatacaatgccattaaggatgagaagagaagaattatagcagatatgaatttctattcagaaggtcttccttatccttctaaagatattttaatatgtcctatgacccgaagggttttataaagcgtacatcttatgtaaagttatacgaccaatatgctatttctcatatggatgctaaacatacaagtcatcttaaagcaatgagtaaggcaacaactaaagatgaatacgactaccatcaacatatgtctgaataccatagaaaatgattcaaatttacctagaaatagcgttagtgataatttctttggtagtaaaatgtttaatacttttataatttttatttaaaaaataaagataaaaatattaatgtatttaagtatatgcaaaatgtatttaaaaatgtaacattttattacgagaacggtatgcaacctaatccaataccttctcctaacttctttagctcagataagtattttaaaactataataattatattaaaggaataaaaaaaaggtgttaacagtactaatagacacctaggtgatacagacagcatcattaattcatcagactatgtgaaaaccctgctgtattacatctacaccaactatatactacaggattaaattctactttacatgatattgatactatgtttgaacaagccttagaccttgaaaatgcctcctatggattatttggagatatgaaacatattattttacagtataattctatgattgaagaagaaattaagaatttacctagagaagaaaaggatattattaataaatatgtaaaacaatgcataattaatgattattcaccaacaagtatttcaccttctgcaaggttatcaatgtttactatgcagaaagagcatatagtttacaataagcagttaaataaaggaatcaagagaggatttattaccattaagtctaggaggtatagtgaataaagatttattgagtggtatggatatacaaaacttagaacagaatggtaatgaatacctatatatgagacaacatacttcaacttattatatattaagaatgtttggtgactatttagggtatgaggtaaacttaagagaagtaaaatatattgtagagaaatataatttaattgataaaataccattgacaaaagagggtatgttggattataataaacttatacatttagtagaggaagaggttaataactatgagtaagaagataaaggagcttatccttcataaatcaatgaaggatatacattttgcaagagaagtattagataacttacctaagaatctattttcagcagagtctgaggacatgggttacttatttacagctataaagagaacagcacatatttccgataagatgtcaaatgaagcattagcaattaaagtagaacagcttatgggtaataataaggaagatgaagagaagtaaccaagacattaacttacttagaagatttatataaagtagacgttaatgaaaaagatgaatctgttaattatgaaatagagaagtatattaaaacagaaatgtcaaaagaagttttagttaaatttattgcagaaaataaacaagaagactctgataatctacatgaacttgtagacaaactaaaagcaaatagaagtaagtgacatctcaggaggtaatggggagtttattgacttcttcgaagatacagaaaagaaacaagaactattgagtaatttagctacaaataaaattctctactggatttacttctattgacaaccatattgaaggtggtatagcaagaggagaggttggattaatcatagctcctaccggtagaggtaaatcattaatggcttcaaacttagctaagaattatgttaaaagtggattaagtgttttatatattgccttagaggaaaaatggatagaatggttttgcgtgctgagcaacaaatggcaggagcagaaaagagtcaaattgtaaatcagggatatgtctttaaataataaagtttatgatgcaatacaaaatcattatcagaagaatagaaagttattaggtgacttttatatttctaaacatatgccaggtgaagttacaccaaaccaattagaacaaattattgtcaatacaacaattaagaaggataaaaaatattgatgttgttattattgactatcctcacttaatgagaaatccttatgctaaatatcattcagaatcagatgcaggagggaaattgtttgaagatattcgtagattatcacagcaatatggatttgtttgttggacgttagctcaaactaaccgtggtgcttatggttcagatgttattacaagtgagcatgtagaaggttctcgtaagattgtcaatgctgttgaggtgtctttagcagtaaaccaaaagatgaagaattcaagagcggtttcttaagattgtatttagataaaattcgtaatagctctaacacaggagaacgatttgttaatcttaaagtagaaccaactaagatgattgtaagagatgaaacacctgaagaaaacaagagcatatacaattgctatcagataatggaaaagaagacacaagtaaatttcaaaataaagataataaaatagaagctataaataacacattcggaggattaccgggagtttaatttttttaaaatataccacttgacattttatatgttaggtggtataattattttataaagaataaaggagagattaataatgaaatttgtattctttacagatagccactttcacttatttactaactatgctaaacctgatgagcagtatgtgaatgatagatttagagaacagatacaagctttacagaaaatgtttgatattgcaagagaagaggatgcaacagttatatttggtggggatttattccacaaacgtaacgcagtagatactagagtatataataaggtatttgaaacattccaacttaatagagatatagaagtactaatgttaagaggtaatcatgatctagcgacaaaatagtttatatacagattctagtatagaacctttcggttacttacctaatgtagaggtttgtaaaaccttgatactttagggttttaggagaagaacagatattaatattgttatggctccttatggagacgagactgaagaaattaaagagtttattaaaaaataaatatgtagaagatagagtaaatatcttagtaggtcatttaggtgtagaaggctctttgactggaaaagggtctcatagattagaagggcatttggataccaggatttattacctgataaatatgatttcattttactaggtcattatcaccgtagacaatatttccaaaatccgaatcattttatggtggttcattaatgcaacaatcattttctgatgagcaagaagctaatggtgttcatttaatagatacagaaaaaaatgactacagaattcatcccaatccatacacgtagatttattactattcaaggagaagatattcctgagaactttgaacagctaatcgaggaagataattttattagggttatcggtacagcaaatcatgctaaggttttagaaatggatgacagtatgaaagataagaatgttgaagttcaaattaaaagagtatactgtagagaaacgtattgatagtgatgtgtctgatgaccctttaacaattgctagtacctatgctaaacaatactcacctgaatcagaacaagaaatacttgagtgtttgaaggaggttttataatgaaaaatatagagaatatctaaataagacagatgcagaaaatttagcagaggattgggagaaagtaaccgaagatttatggaaagtgtttaaaagatatgaaacctaaaattaatacattagatatcagtaatgtagtaagtaaagacttagataaaagtaaacctattttacaattcaagattcagatgggtaatagagaatatttgtaatgttgaaggtttagaagatggtctaagtaaaatgaaaaagattttttgatgatagtaattttgaaaacattattacaatagagtagtagaccatgatgagtattactggattgattatggctctcatcattgtttctttagagttacgaaagggataagtaatggttgtatttaaacaagtagaagttaataattttttagcaattaaagaagctacgctagagttagacaatagaggattaattctaattgaaggtgagaataaatctaatgagtcattcattcaaacggctccaggaaaatcaactttaatatctgccattacttacgctttatatggtaaaactgaaaaaggactaaaagcagatgatgtagtaaataatattgagaagaaaaatacatctgttaaacttaagtttgatattggggaagatagttatttaattgaacgttatcgtaaagataaagagaataagaataaaagtaaaattattcgttaatgaaaaaaaaagagattacaggttcaacaaatgacgttaccgataaacaaatacaagatttatttggtattgagtttaatacttacgttaatgccatcatgtatggtcaaggagatatctatgttctctcaagcaacagataaaggtagaaaagaaattcttgaatctattactaagacagacgtatataaacaagcacaagatgtagcaaaagagaaagttaaagaagtgggaagaacaacaaaataacataagacaggaaatctataaactaggttatcagttatcgacaaaagatgagtactttcaaagagaaatagagcagtacaatcaatataaagaacaattggttcagatagaaaacagtaataaggaaaaaagatagattaagagaacaagaggagaagcaaatagaagctcaaatagagcaactagcttcacagataccaacaatacctgaagatgaatttaagcactcagaggagtatacaaagcctcaaagcctagatttactttctaataaattaacggagttaaatccaagtttactcaggtataataccaaagaacaagtactaaaatctgaaatagctacattaagcaatagtctaaatcagttagatacaaatgaccattgtcctgtttgttgaaaccctatagataattctcataaattaaaagaacaggaaaatatcaataatcagattgagaataagaaacaagagattactagtgtattagaaatgaaagatacgtataaagaagctattgataaagtaaaagataaatcacaagaaattaaagataaaatgtcacaggaagaccaacaagaacgagagcacaataataagattaacagcataattcaagaggcttctaggattaaatcagacattagttcattagagaataataaaacgtatttaaaagttaaatatcaacatcaatctgttcaaggattagagagagaagaaccaagtaaagaaaacatgaggaagataagaaaagaattacaagaatctattgacaaacatgaagagaatatagtacaattagaaactaagaaaggtaaatatcagcaagctgtagatgcttttagtaataaaggtatacgttcagtagtgttagactttattacaccattcttaaatgaaaagcaaatgagtaccttcaaactttatcaggttcagatattgaaatagagttccaaactcaagtgaagaatgctaaaggagaactaaaagataagtttgatgttattgttaagaatagcaagggcggaggttcgtacaaccaattcagcaggagaacaaaacgtattgatttagcaattagttttgcaattcaggatttaattatgagtaaagatgagatatctacgaatattgcactttacgatgagtgttttgatggattagatactatcggttgtgaaaacgtgattaaattattaaaagatagacttaatacagtaggaacaatatttgtaattactcataataccgagcttaaaccactgtttgaacaaacaattaaaaatcgtaaaagaaaatggagtatcaaaactggaggaaaaataatgaaattaaagattttagataaagataatgcaacacttaatgtgtttcatcgtaataaggagcacaaaacaatagataatgtaccaactgctaacttagttgattggtaccctctaagtaatgcttatgagtacaagttaagtagaaacggggaatacttagaattaaaagattacgttctactttaccttcatcttatggttttagatgataataacaagatattattagagataataaccatagatgtaaataggttattggtacaaccctgcagtacgcaaagataatttaaagattatagagaaagctaaacaatatggattacctattataacagaagaatatgatgctaatactgtagagcaaggatttagagatattggagttatattccaaagtcttaaaactattgttgttactagatacctagaaggtaaaacagaagaagaattaagaatatttaacatgaaatcagaagagtcacaactgaatgaagcacttaaagagagtgatttttctgtagatttaacttatagtgacttaggacaaatttataatatgttgttattaatgaaaaattagtaaatagtaaggaaggatattatgaggtttgaagacttttaacccaagaattaggagaaccaaagaaaatactataggtgagctaagatactgttgtccgttttgtggagaaaaaagttataagttctatgttaagcaagcctagactctagtaatggtcagtatcattgtaaaaaatgtgatgaatcaggtaaccctattacatttatgaagacttattataacattacaggtaaacaagcttttgatttattagagtctaagaatatagatatagagagagccccttacttacgaccaataataaggatttgacagaatcagagaaacttatattaatgcttagaggtgtgcaccaagataaaggaaatactagtattaaacctcctagattacctgaaggatataaattattaaaagataacttaaataataaagagattataccttttttaaaaatgcttaaaaggcagaggtataactttagaacaaattattaataataatataggttatgttattaatgggagcttttataaagttgacggggaatccaaagtatcattatgaatatattatattttttacttatgataatgatggaaattaccagtattggaatacacgaagtatagaaaagaacccgtatattaaatctatcaatgcccctgctaaacaagatgaagtaggtagaaaagatgtcatatttaatttgaatatagcaagaaagaaaaaagttcttagttataactgagggtgtatttgatgctttaaccttccatgagtatggcgtagcaacattaggtaaacaagtaactgagaatcaaataaaaaaaaataattgattatgttagtatagatacatcaatatatattatgttagacactgatgcattagataataatatagacttagcttataagttaaaacacattttaataaagtttactttgtacctcatggtgatgaagatgcaaatgatatgggaacaaggaaagcttttgagttattaaaacagaaccgggtgctagtaacacctgaaagtatacagagttacaaaaaatacaacaaaacttaaactttaggcttgaccttagagaagttttatgttatactagtaattaagtaattaataaaggagaaaaaaaaataatgtcaaataataaaaaaagatattttagaatttgtagatgaatacattacagctttaagagttggtaatgagcaacgacaacatcaattagaagaaatgggtaaagaagaaacagcaacattaacagatgtagctaaagctattactaaccttatgttaggtgttaatgagcagatgacagacttagaatataataacgagttaaacttaaatattttttaattgatgctttatataaagcagagcttattaatgaagatgtattagactacattcaagaatcaattgataaatcacaagaagaacctaaaatgaagaagaaaaaaggagaacaagaataatggaaaaaaatattagcacacacacaaaggtattagtcaagcagacatggagaaatggattgaagctgtagtacaaggaactgttgatggtaaacaagttgatgagaaaacagctaaacaattagatagaattggttcacgaagtgtttctttagaagaagcaactcgtattgctaaagttcttaatgctgtaacagctcaagaggttacaggagactttaatgatgcatttaatgcaattgacttaatgatgattatcatggaagatgagttaggagtaactcaagaaaaaagtaggtaaagctaaagataaactaaatgaaaacgagaagcttacctaaaagagaaacaagaagaattacgtcaaaacaacaagaagaggcacagaaaaaactgaatctgacagcaatgaaaaaagtaattcagttgaagaaaaatgacgaacagtaagaaaaaggatacattcgaacgtaaaatagctaaagaattaactgcttggtggggataccaattcaataggtctcctcaatcaggtggtgcttcatggggtaaagataataatgctgtcggagatatagtacctcaggaagctaattttcctttagtagtagaatgtaaacatagagaagaatggactatagataacgttcttttaaacaacagagagccacacatggtgggagcaagtcattaatgatagtagtaaggtgaataagacaatcttgcttaatatttactagaaatagagctcagagttatgttgctttaccttatgatgagaaagtatatgaagatttaagaaataatgaataccctgtcatgagaacagactttattattgataatattagaaaagataaattttttttatgatgtccttataactaccatgaatgggttgacctcatttacaccttcttatattatatcttgctacgacaaaagatataaaaccatacaagaaggtcgagtctaatttatctgaggtaagtaagcatgaagatgaattgattaatgaccttcttagtgatatataaggaaggtaagataagtatgacaagcaaaagaaaagaccattaatcgtatattttttcaggtacaggacaaacagaaagattagtaagaaacaaaattaatattaataattcatttgaaacatttagggttaagagtggaaaagaaaaaagtaaataaaccttttatactaataacacctacttataagaaaggtgcaatacctaaacaaatagaaagattcctagaaattaatggagccctaaagaagttattggcacaggaaataaacaatggggctctaatttctgtggagcaagtaaaaaagatttcagagatgtttaagattcctttaattgctaaagtagagcaatcaggacactttaacgagatacaaccaatattagaacactttagtaataaatataaagtagcgtaaaggatgagagatatatggcaacatatggaaaatggattgagttaaataatgaaataactcaattagatgacaatggaaaaataaactctataaagaccaagaagcttttagatgagtatttaaaatatattgaagacaatacaagaaagtttaatagtgaagtagaaagaattagagtattgacaaaagaaggaacatatgataaaatatttgacaacgttcctgacactattattgatgaaatgactaagttagcttacagttttaattttaaattccctagtttcatggcagggcaaaagttttatgaatcttacgcatcaaaacagtatgatgaaaacaaaacctatttttgttgaagactatgaacaacataatgttcgagtagctttatatttatttcaaaatgactatgtaaaggctagagaattactagtacaacttatggagcaaacattccaaccatctacacctacattataacaactcaggacaagctaatagaggtgaactaagctcatgttatctatttgtagtagatgattcaattgagtctttaaactttgttgaagatagtgtagctaatgctagttctaatggtggtggagttgcaattgatttaactagaattagacctaaaggagctccagtacgtaatagacctaattcaagtaaaggtgttattgcttttgctaaagctattgaacataaagttagtatttatgaccagggtggtgtaagacagggtagtggtgctgtttacctaaatatattccacaatgatatcttggatttattaagctctaagaaaatcaatgccagtgagtctgttagactagataaattatctattggtgttacaatccctaacaaatttatggagttagttaaagaaggtaaacctttctatacttttgatacttacgacattaataaagtgtacggtaagtatttagatgagctaaacattgatgaatggtatgataagttactagataatgatagtatcggtaaagtaaaacatgatgctagagaagttatgacagatattgctaaaacgcaattagaatcaggctaccttatgtattctatattgataatgctaatgataatcaccattgaaaacctaggtaaagttaaaatgagtaacttatgtacagaaatttcacaattacaagagggtatcagaaatttatccgtactcttacagtaatcagaatgttattaatagagatgttgtctgtacattaggttctcttaacttggttaatgtggttgaaaaggtttattgaatgaatctgtagatattggtacaagagcattaacaaaagttactgatattatggatttaccttacttacctagtgttcaaaagcaaatgatgatattagagctatcggtttaggttcaatgaatttacatggacttttagctaagaatatgattagttatggttctagggaagcattagacctagtaaacagtttatatagtgctattaacttccagtctattaagacatctatgttaatggctaaagaaacaggaaaaccatttaaaggtttcgcagaagtccgattatgctacaggtgaatactttgtaagatatattagagaatcaatcaacctaagacagataaagctaagaaagtcttaaataaggtttatattccaacacaagatgattgggatgaattagctaaagcagtaaaagtacatggcttgtataatggttatagaaaagcagaagcacctactcaatctatatcttatgtacagaatgctacaagttctattatgccagttcctagtgctatagagaatagacaatatggagatatggagacatattacccaatgccttacctaagtcctataactcagttcttctatgaaggagaaacagcttataagattgacaataaacgtattattaatacaagcgcagttgttcagaaacatacagaccaagcagtgtctacaatactttatgtagaatcagaaatccctactaataaactagtatcattatactattatgcttgggaacaaggattaaaatcattatactatacacgttcacgtaaactttctgttattgaatgtgaaacatgttcggtttagaaaggaaatagatatggatattacacaaaagtaaaacaacataataaaaatgctgtattaaaagcaacaaactggaatattgaagatgacgggatgtctgatatttattgggagcaaggaatctcccaattttggactcctgaagagtttgatgtatcaagagatttaagttcttggaatagtttaactgaaagtgaaaagaacacttataagaaagtccttgcagggctcacagggctcgatacaaagcaaggaggagaaggtatgaacttagtatcctaccacgaaccaagacctaaataccaagctgtattttgcgtttatgggtggtatggaagagatacatgctaaatcttatagtcatatttttacaacattactaagtaataaagaaacaagttatttattagatacttgggtagaagaaaacgacttttaaaagtaaaagctcagtttatcggatattactacgaccaactattaaaacctaatcctactatatttgatagatacatggctaaagtagctagtgccttttagaaagtgcattattctactcaggattttattatcctttacttcttgcaggaagaggtcagatgacacaatcaggagctattatttataaaattactcaagatgaagcttaccatggttcggcagtaggattaacagctcaatatgattataatcttctaacagaagaagagaaaaaacaagcagataaagaaacttatgaattattagatattctttacactaatgaagtagcgtatacacatagtctatatgacccactagaattaagtgaagacgtaattaactatgttcagtataattttaatagagctcttcaaaaccttggaacgagaggactattttaatcctgaaccttataaccctattgtagaaaatcaaactaatgtagacagattacgaaatgttgatttctttagtggtaaagcagactatgaaaaatctacaaatatcaaagatattaaagatgaagatttctcattcttagatagtaaagaatacagtactgccaaggaattctataaaaggagaaaagatattatggatagaaaagaagcaatggatttactaagtaaagcagaaatattatttaaaaaacatgatgagttttcatgtgtaagtgatatcaatgaccctatgaagttattcagtaactctaaggatgctaaagctgatgatacgtctaattcttttcagctagagtttatgcatgatatgaccatgtatactttatcttatggctcaggacagctaaaacttattgatttagcagaaggttatgaagcacaaaagctacaatagttaactcatttcccgaaattattaaaacattagaaaaggatgattcagaagatggaaaaaatgaatagtttagtagatttaaatacagcaattagacaaaagaaagatgttattgtcatgattacacaagataattgtggtaagtgtgagattttaaaaagtgtaatccctatgtttcaagagtcaggtgacattaaaaaacctatcttaacattaaatctagatgctgaagatgtagatagagaaaaaagctgttaagttattcgatatcatgagtacaccagtattaattgggtataaagatggtcagttagttaaaagtatgaagaccaagttacacctatgcaattacaaaattagagtcacttttaatttggaatttcctactatctgtgctatactataatagtacaaggtagtaggattttttaatggaaggaagatgacatatcgcaaagaataaaacattaacgatatataatagtgatagatattttaatatacacacaaaagataaagataaaattaatgaggctattaaagtaacacacggtaatgaagaagaaattgaaaagaatatggatgaattaatatctaagtctagaagatatatcatgagggatgaaaagcattacatgctatttaatgagaagtacaataatgataggcttatagaaaagtatgtaaacacggtggtaagttacatactatactgattcagtattaccttactatgttttaaaagacttatctagtcaccctgactcagaagttgtttatcgtatgcgcaacggttttactgcaaaagaagtagataatatagctttatcattcatgggtacaaaagttattattgatatttctgtagtatttccttatgtaaacccttatgatattattagaagtttacatgatattaaaacaaatgtagatgaagttcatttatcatttccacgaatattaggggtagatgaaaacaagaaaagttttatttctttgatggtgaagcttatgatttaaaacccgaatataaagtcgattttgcagataaaattagagtatctttatcagtatggaaaatgtatatctatatcttaacaagtagtcgtgattttgaggatgtagacaatgtaattacgaaattaaaacaacaacgaaagattaagatataaggtgattatatgagtacagcaaatagaagagatatagcaagaaagatatcagagaatacaggttactatatccaagatgtagaggaaatactaagtgcagagacagatgctatttctgacttgttagaagaagggtatactaaagtaaagaatcataaatttatgcaaatagaagttattgtgaaagaaaaggtaaaagcgtggatgtattcgatcaaagaatacttccatttacctaatagaaaagctataaaattcaaaccactaaaaagaactagaagaggttattgatagacttaatgaagaagagaaataattctcttcttttttattgacaaggtttaaaatatatggtatagtattattaagttaaaaaaaggagaggaattaaatgaaagtattaatcttatttgaccaatattagagaagagcatttttctgtaagtaaagatgggagtgtgaaatctaatgtactaaatacacctaacggaaaaacacttaagaaattacttgagaagtgttctaacttaaagagagataaaacaaacagagattatgatattgattttctctacaatgcagtacctacacctattagaaatgactacggtaaaatcattaaataccaagatgttaaacaagcagaagtaaaagccatactaaggagagaatgaataatattattattgataattcttatgatatggtaattcctgtaggtaaactaggtgttaaatacctattaaatgttacagctattggtaaagtaagaggtgtaccaagtaaagtaactattgaaaatggaacatcttcttcatgatgtgtgggtattacctatagcattgaatatactaatgtaaataaaaatagtgaacgtcatgtagtatcagatttacaaacagttggtaagtttcagagcaaggaggatgaacctaaggaagtatcttacgagttggcagataacattgaaagagtaagagaaatattcaataaggaagtaaagaatgataattatgatggggtgatattaccgcatgggacttagagactaacctattaaaacctgataaagaagaagtaaaccttagtactatctctatcatggagaaatggtccaaagtgtaactatacccttatacaaatcagacttttaactaaaacggtcaagatgatattgatgaagtcttagaattgcttaagaattggttagctagtaaagaagtacatattaaagtagcacataacggtaaatgatttgttgttgtaaaatccctctcatatcgggcatagctttaagtagctgataagagaacctaagtcctgtaataaggatagtggtaatcgagcttattattggtgacaatagatggggtgtagagactgagccgaggttttgtagaccaaggtgagacatagtgtatcgacttaatagaggtggtacagtgaaaaaaagcattatatgacatcagttaaaaaataacaaaagtatgtagaagatgcaacgaagaattagatttatctaactttaaaacatataagaagaatgataaaaacttattatcaaagtatgtgtataccttgtcggaaggaatataataagttagataaagctaaccactaaaaatgttatgagaaaaggcaggagataaatatagaagacaaagtaatgagtataatacttctgacagaggtagagagctaataaaaataggtctagggaaatacagagaaagtaattcctgaaaagctagaagcctgtaagaaccgcattaagaaatggttctctcataagacctgataagtgttcagagtgtaataaagattgcatacctgaagctcaccatcctgattatactaaacctttagaaataaaatggttatgtaaatcctgtcatgaagatactcatcataaaaaaataatcacactatgtaaatgaggacatcaagcccatttaggtaactacaaacaaacctaatggtaagggctttatgaaggtatagtccgctcctatatagaaatatataggctaaaacgaaatatgatattaagttcttaatgagtactgaaaactttaaagattttgagagtattcaggatactaaaagtaggttggtacctagctgttactgttaagaagttaaagaatctttaagattatctgatttagcttatgaggttacagatgtcggaggctatgataaaccattagaagactttaaattatggtttgttactaagttattaagattcttctcagataaaattaaagagatacagaaagaaaataaaaagattgctaagaaagagtatgatgttaaagctcctgaatataaagaatggttagagaataaattaaatgaaacagtagtagaactagatgatactgagaaaaatttagagttagtgaattagagaaaagtatattcaactaggtctttcacctgaaattgtaaatatgaatttagttatggataatgatgaattcataaatattgcagaacaatcacctgagtacatggggttatctgactacgctaagtcttacgttaaatactgcaattaatttaattaatgagtatagagatgtaaaagatgtagttaatgatattgaccggagtaactttaattatgattggttccctattgagttaatgcatccatacgcatcaggagatactgatgtatgtagaagaatttattgtgatgtaattaagaaacttaaagaacaagatagacctaagtcaatgcatttattagaagttaattacccaagacttactaagtctttagctagaattgaatcaaatggtttatattgtgacttagattatatgaaagaaaatgatgagtcatacgagtctgagatggctaagaaccatgctacaatgagaggttaattgggctgttaaagaatttgaagaataccaatacaatctttaccaaatggcgttagaagaacatgagaaaaaagccaaaagatagagataaagatatccatcagtacagagataaatttaaagatggtaaatggatgttttccccaagttccggagaccataaaggtagagtaatttatgatattctaggaattcaattaccttatgataaagaatatgtcaaggaaaaaccatttaatgctaatgttaaagaagcagaccttacttggcaggactataaaacagacaagaaagctattggttatgcgttagataatttagaattaaaagatgatgttaaagagcttcttgaattacttaaatatcatgctagtatacagacaaaacgtaattcatttactaagaaattacttaatatgattaataaacaaaacgaacattacatggttcttttttctgagacaggcacagagacatcaagactaagtagtagtaacccttaaattggggttgtaaaactttgttaactgcgggaagagactcgttaggtcttaactactaacttataatggaaacatatataagggcaaacagtaacgtgtttgatatagtaaaaggttaagaatagagagaatccgcatccaagaccctgaaagtatataaaagtatgggtaaggttcaacgactaggtgttgagacaatacaatcaatacacacccacgaaaagcaaaggtattatttctgtggtaggaataataaggagagttatatgaaagagatttggaagaaagtagtaggatttgaaaactacgaggtaagtaataaaggaaaagtatgaatataaaaactaactatattttaaagccgtggataataaattccggatatgaggcaaagtatctataggtattgctaatgtattagtacatagattagtggctatgacatttataccttactgacagctatagtatagttaaccatattgataataataaattaaataactgtgttgaaaatttagaatgggtgaagttacaaggtaatagtgctcacgctaataagcaaggaagattgaatacttatagtgcaagagaaaacttagttctgtatctaagaaagccatttatcaaaaaagatatggaaggtaacatcattaagttatgggattcaccaagtgaagctgaaaaagaatctaatgggtactttaaaagtactaagattggttccgttgctcacggtaaacgtaagcatcatagaagttatacttgggaatacgtatataaggattcaaagagaagtttaaataagtctattaatatgtatgatttaaataataatttattatatgaagatttgacaatgaataaaattatgggtatactagaaatgaataatcataaaacattaagagataaactaagaaatacagatgactttgttgaatacagaggatataaatttaaaataataattaaaacctaccacagaaatgatatatgatatagtctaccaatagtgagagctattgtgttacctaaacagtaacagattgtaaactaaaagcttacaaattatagaatttacaaaacttacctgcacacacatcagatgtaaataagtttgattacaaacatccaattaaacgttcatttgtttctagatttgaaaatggagtactgctaggtccgactatagcgccctagagatgcgtattatcggattatttactaaagaccctgatatgctacaatcattcttaaatggggaagatatccataaggctactgcaagtattgtttacaataaaccagtagaagaagtaactaaagaagaacgacaagcaactaaagcagttaacttcggattagcctttggtgaatcacccttctcatttgcaggtaaaaataatatggaagtaagtgaagcagaagaaatatttgaaaagtatttccaaacaaaaccaagtgtaaaacttctattgacaatgtacatgagtttgtgcaacaatatggttatgttgatacaatgcacggacatagaagatttatccgttcagcccaatcaacagataaaagataaaaaatgaaggtctaagacagtcatttaacactatcatccaaggttcaggtagtttcttaacaaacatgtctttaacttacttagatgattttattcaatctcgtaatttaaaatcaaagttattgccacagtacatgatagtatcttaattgattgtcctcctgaagaagctaaaattatggctaaagtgacaattcatattatggaaaacttaccatttgatttcttaaaagcagaaattgatggaaaagaagtacaatatctattgaagccgatatggaaattgggttaaactataatgatatggttgaatatgatgaggaagaaatagatacatttaattcttaccaaggttatattaagtatatgatgaatttacagaccttagaagattataaagagtcaggtaaactaacagatgaacaatttgaaaaggctactaatgttgttaaaagtgaaaacatatttatcaagaaatttaataaaagtattgacaatatagttaacttatgttatactatataagtaataaatataaggaggaaaagagtgaatacagggagattagatttaatcgttctatggatgaatggattataacaagcatgtaccaggatgagctaggtgggatgaatattgttgttacattctataatagagaagaaaataaacatggttctacagttttaccaacagagtcatctactggagaagtaacagaggaattggcaagtcttgaagaagaatatcctttagctttacctttaagtagtatctcagttaatatttaaaaggaggaactgataaatggaaatacacattgattccctagattttacaaactttactattaaagatagaaatgggaactcacaagagtttgatattacagatgagttaagaattacagagtatacaatacaagaggagttttatgcaacaatcagctaaatatgcttttttgggcttctatattagaaggtaagagcatattctgaaatggaacaaagaaacctagaaacaattggtagtaagctaaaccttacaattagacaagagtacgaacaacaaggtaaaagcctactaaagatatgattgaatctagtgtttatattcacgattcttatcaacaacaacttaaagttgttgaggcttgaattataaagttaaacaacttcaatatgttgtaaaagcttttgagacaagaagagatatgatgattcaattaggtgcagaattacgacaaacaaataaaaatggtggaattactaatccattttcacattaaaaataaagtaaagaatataattgacaaatataaaactatgttataataaataagtaaattaattaaaaggagaaaagataattatggatttcaatcaatttattaacaatgaggcaagcaaattagaaagcaataacagttcttttaacaataatgtagagagctacaaacctaaaaccctgtactacgtttaggtaatattaaagatgcaaacggaaataaggttgttaaagaaaatgcttttgtacgagtattacctcctgcacaaggaacaaatgttttctttaaagaatttagaacaacaggtattaactattctaagaaagatggttctcagggattcacagggttaacattacctgcagaagaggttcatctgtccttgacccatacattcaggattggataacaaatggtgttcagttcagtagattccctaataaaccaggagtacgctattacattcatgttattgaatactttaataacaatggtcaaattcaaccaaaaaacggatgctcaaggaaatgtaatgattcaacctatggaattatctaatacaggatataaagaattattagctaacttaaaagacatatgttaaaaccatcacctaatgcacctcatagctttatctcagcaactgaagcattcctagttaatattgttaaagctaagaaaggtgaaatgtcatggaaagtaagtgtttatcctaatgcccctttaggtgcgttacctcaaggttaggaacaacaattatctgacttagaccaattagcaaaaccaacagaagaacaaaatcctaattttgttaacttcttaatcaataacgttaataacacagagttaagtcatgataactttaaatttaaccgtgaaacaaatgtcttaggtgaagaaccttcagagcctaaacaagcacccacacaacaagatgtagatagtcaaatgccaagtaatatgggaggacaacctaatcagcctcagcaaggtcaagtaggtcagtatgcacaacaaggtcaaagtaatggtcaaggacagcagttacaaggtacacaacaacctatcaataacactcaatttggtcaaggaactccttcaggacaacaaccaagtaacacaggttctgttgattgggataacttagcgcaacaacaatcacaacctgattcaaacccattcaatgattttgatgttagcagtgttgatgattcacaggtaccttttgagacacaacctcaaaatacacaacaagcacctgaaccacaacaaactacacaagagcctccaaaacaaaacaaacgcaaagtattgacgatgtattaggtggtctagacttagataacctataagatatagagtgccttagagcactcttttatttgaatataattactaggaggatattaaatggcaagagcaaaaaaaggtaaagaagtcgatttaacagatttaaatacaattgatttaggtaaagaattaggattaacattgctatcagatacaaacagagcagatattaaaacgttatacctacaatggttcctcagtatgactatattttaggtggaggtattccattaggtcggttaacagaagtttacggtttaactggcagtggtaaatctactttgcagttcacttatctcgaattgcaacacaattaggtgttatcactatttggattgatattgaaggaacagcagataacaatcgtatggagcaacttggtgtagatgtttcaaaactattctctattcaatcaggagaaggtagactaaaaatacagtagaattatctgtagagcaagtaggtaaagaattagagtactggattgacactttcaatgaaagattccgggagtacctattgtatttatttgggactcattaggggctacaagaactcagaaagagattgatggcggtattgatgagaagcaaatgggtcttaaggcatcagctacccaaaagtaattaatgcagtaacacctaaactaaatgatacaaacacagggttaattgttattaaccaagcccgtgatgatatgaatgcaggtatgtatggtgaccctattaaatctacaggtggtagagcttttgaacatagtgctagtttacgtattaaggttcataaagcatctcagttaaaacagaaaagtgggttaactgagtaaagatgaataccatggtcacattatgcgtattgaaactaagaaatctaaactatcacgaccagggcaaaagctgaagcagacttactatctgattatatggtaggtaaagaagatgaccctatcttattaaatggtatcgacttagaacatactgtatataaagaagcagttgaaagaggtttaattaccaaaggagcatggagaaactatgttacattgaatggtgaagaaattaaacttagagatgctgaatgggttcctgtacttaaagataataaagagttatatctagaattgtttagtagagtttatggagaacacttcctaatggttactcaccattacttaataacaaaagtaatcgtaactcaattagaagagtatcaagctcttgaaaactactataaagaatgggctacagataataaacaagaggaacaagaggaagaactaaaaggagaatctcaagaaaaggattctgaataatagatggataatttaatagataaaacatgaatcaggtaaaagaatctttgggaatgcaaattcctcagatgttcttcctttaccttataaagatatagcaaagaaatttgaagaagtaaagaaaaggtgaatcaattatcattgaagaaggtggattcccttatacagattctacagtgatgtatatagaacatgtaacagatagatgggcaggaggatattccttaattagacatgaaggtgaagaagttaaagtacctaagactatccatttctcctgatatatatgttaaagataaatcacacaaagtaagaataatcttcgaggggctaatccttatgaagaaagctaataatggtaatagatatgtaatagatatagatggtatacctgttgattttgaaagggatttagatagtttacttaataggtataaaaccttagatggtcgttatatcataggtacgcaggattttatctaatgattttgaaagacaagaactaagagaatatattgatgagcaatttattaaattagttaaagaatataatattagaagtaaagtggattttcctggatatattaaagctaaactaactttaagagttcaaaatagttatgttaagaagaatgaaaaatataaacgtactgaaattatcggtaaaaaaagattatacagtagagtctttaacagaagatttaaatgaagacttcgaggataatcaaattatgagttatgtatttgatgatatagaatttacagaggttcaaagtgagttacttaaagaattacttattaaccctgaaagagaagatgatgcctttatcgtttctcaagtagcggaaaagtttgatatgaaaagaaaagaagtagcaagtgagttgacagaactcagagactatgttagatttaaaataaatgcataccatgagtactatgctaagaaagaattaaataaccatagagttaatactgaaaatcatatttgggaaaactagttacagtgccttccttgtgttatattattatcgagaattcaataataaagcatagggaaggcttttttctatgtcttatagaatgctttaaaatagattactaaaataaagattggagattaagcttatggctaaaagaatgttaatgatgtattacaacaagaatctgttacagtagcagataagtatttacaagttaaagttaaccgtgacggttatactcgtacacatgaaggacaatatgcgtacaaagtagtttcagagggagaattattcttataccctgtacaaacagatggtaaaggtacattaaatgtaatgaagaaatcacctattgcttacactgatggagacaatatccatttcgtagtaaacacagtagtagacccttataatcactcatttatccgtactgaagatattaaaggattagataaaggtaaacaacttattcaagctttcttagctttcgttgaagaccgtttcaaatttggtgtttataacgtatttgttgcaaacaacaaagaggatgtattatctattgtagaccctacagataatgatgcagatgaagttaaagatagtttagagcacgcacatgaagatgtaattgcggatttccctgctagccctgctcgtaaggacgttaaaggcgtagattcaggagaaggtcaaggagacacttcagaaccatcagcacctaagaacgttcaagttactcctaaggaagacggagcagacgtatcagcagaataatatatagataaggatggtaaattggctaagttaaatttatacaaaggtaatgagttactaaacagcgtagaaaaaacagaaggaaaatcaacaatcacgattgagaatttagatgctaatacggattaccctaaaaggtacttttaaagtatcattctcaaatgattcaggagagtcagagaaggtcgatgttcctcagtttaagacaaaagcaattaaagttatttcagttacccttgacgttgatagtttagaccttacagttggagatactcaccaactatcaacaactatcacgcctagtgaagcatctaacaaaaatgtgtcatttgaatcagacaaatcaggtgttgctagcgtaacatcagaaggcttaattgaagcagttagtgcaggaacagctaatgttactgtaactactgaagatggtagtcacactgatattgttgttgtaacagttaaggaacctattcctgaagcacctgcagacgtaacagttgaacctggtgaaaatagcgcagatattactgtataggaggacaataaagaatggaaaagacattaaaagtttatagtaatggtgaagttgtgggctctcaagtagctaataacgatggagctactacagtatctattacaggcttagaagccggaaaaacttatgctaaaggagattttaaagtagcatttgctaatgattcaggtgaatcagaaaagtagatgttcctgaatttacaactaaaactcctactgaagaaccttcaggagacgcataataattaagaccaactaaaaagttggtcttttttttattgacaatttataatatctatgatacactatataagaattaagaaaaggaggaaagtaatggatattccaacaatattatttagaaatccatatgattatacgaaagtaaaaaaattaatggaaaacaaagagcagtatattgtagtaaagtttgattctgtttctgttcataatttaaatgttcaaggtatgatgaatgtcatccaagattacctacacatctatggttacagagttaaagagtacggacaagaaaattcttctaaagatgatgaaagagacgttaaaggctacttatatgaaagagtaggtgagtagggtatgggaattatagtaaactccaaccatattcaatcagacactttatatgagtatgatagctttttttgatattgagaaagtagatacatttgaagaaggattgctttcaatacaggatgagccaactgttttagcaggattcatctatgatgatatcacatttaataaggtcattaattctaattcagatattgatgattatattaagaataatgataataattattttttctgagaaaataagccaaatactaaaaacagataaagcatagatagctgatagatatactatattagagttaccttacttttatcttttctatagatagaataacctaaagacgttgtaacaccactaagtataaaataatagaaacaaaaaaaattatagacagaaaaaagatacgataatcattgttaaacacctatttcttttgacctattatttctagaacttttagattacaccactaatataacattaaaagccagtcataaaagtcaattgttagattaataatataataaaaaaaagacaataggaggttaaagtggttgaataataacatagctatattcatattcaaaacactggttatcattatattcttactactaatttttgtctgttattaattccttgtccttatttactcaataagaccgagtgtggttatgacatactttatctttggtggtattgtttctaatgtcacttactgtaacagataagttcttactgaagaaagaaggcctacctgaatatgttcttaaaagtagagataaatgataacaaaataagaaataaattccaagaaaaataatagaaagcaattatggcataacaaagcagaagagataaaagaaataaaaaaagctacaaagaagagtagaggaagcatagtaaaggaagattacaatgaaaacaaagaaagcaaattaaagaacaaaggaaagaaacttaaggatggtgctacatctgtttctttagtaaaaaagggagataagagaatacaactcagtagtagaatcttgtagtctatgtggtcagcagttatcaggtatgaaattaataattaaaaggaaaagcatcaaaaaaagttaatcattttcatttacagtattctaagatattatttattttgatatttgcgcagatatcaacaattgttataaaattctaagaaaacgaggtgaaatggattgaggcaggaaaatattagagatataattaacaagaaaaagttagaagaagaggatacaagaaaatatatagctgatgggttttatgaatggtatcggtaaattaatgtaatgaattcaataagaaagtagatcaaaagaaatagaagttaaaagacccgaatgagtacaaattatttgtgatattctctcaaatgcaaaatatggtcaatgaaacttctgaaggagaacatgcctcaactatctagacctcaacaggaattatttgatgagattacaacagaagatagtaatggagaatctacagttgatttacagaagaccttatctagaaatgtcagcggaagatattgcagcaatgaaatttctgaaaggaaaaagtaatgaatgaggaaaaattcgaagaaacattctaaggagaaagatataaatggatggaaaaagaactagtaagatagcacaagaaacatttcaaactgaaaaataacaagagaacagatagaccatataatcaatatgctaaatcctttcaccatatgcttaagtatcatacactgagagggcatcctataacttttagtattcctaatagagatgaagtaagcacaggctcatagaccttggcaaactaggattgtaaatgatactcatcctaataaggctgtaataaaatcacgtcagttaggtcttagtgaaatgggtgtaatggaaatggttcattttgcagatatgcatagttatgctaacgcaagtgtcttaccctgctacaaatgaacaaatgaaaaatttgttcagtcacgtttgaaccctgttttagagaaagaatattttagagacattgttgattgggataaagactcgttaggttttaaaagataagaaactctagtttattctttagaacaagttctaaagcaagtaccgtagagggtgtggatattgattatttatcttttagatgagtatgacagggtaaacttattagcagaatcgtctgcattagaatcaatgtcttcatcaccttttaagattgtgagaagatggagcacaccttctgtacctgggatgggtatacacaaattataccaacaatcagaccagtggtattacggtcatagatgtcaacattgtgattacttaaatgaaatgagttataatgattacaaccctgataatcttgaagaaagtggaaatatgttatgtgttaatcctgaaggtgtagatgagcaagctaaaacagtacaaaatggcagttaccaatttgtttgtcaaaatgtggtaaaccactagatagatggtataacggtgagtggcattgtaagtaccctgagcgtacaaaaggtaataaagaatttacggtatctaataacacaaatgaacgctgtatggatttctgctgatgaattaaaagagaaagaaatgaatacagaatctaagcaagcattctacaactatattttaggttatccttttgaagatgttaaacttagagttaatgaagaagatgtttatggtaacaaatcacctattgcagaaacacaattaatgaaacgagatagatattctcatatagctattggtatagattggggaaatactcactggataactgttcatggtatgttacctaatggtaaggtagacttaatacgattattctctgttaaaaaaatgacaagacctgatttagttgaagcagatttagaaaaataatttgggaaatatctaagtacgaccctgatattataattgcagataacggggactcaggtaataatgttttaaaactcattaatcattttggaaaagataaagtatttggatgtacttataaatcttctcctaaatctaccggacaattaagacctgaatttaatgagaacaataacagggttacagtggataaattaatgcagaataaaagatacgtacaagcacttaagacaaaggatataagtgtttatagtacagtagatgatgatttaaaactttcttaaaacattggcaaaatgttgttattatggatgaagaagatgaaaaaactggagaaatgtaccaagttatcaaacgtaaaggtgacgaccactatgcacaagcaagtgtctacgcctatataggattaacaagaataaagaacttcttaaagaaggaaacggtacaagctttggttctacatttgtttctactgattacaatcaagaaggaaataaacaattctactttgatgaatagaggtgaaatagacttgacagataaattattttatggtacaattagtaatgaagaaattaataaaagtgtattgaatttgttattgggtgaggaattatccttagattatgtttctaaaaatagtgatattttagatgttaaatatgaacatgtttataaatctctaggattcgataatttctttgattgttttatatgctaatagagagcctgaaatagtccataaggtggagataaaaatcttggtggactaaataaggttaaacgtactgttattcgtaatggtaaagaaatggaaatgacagtttacgaagatggtaataaagagaacgatagtaaagaaaacaagaaggaaaagaagaagttagtagaagtgcagtaggagcaagagctatttctaatggtgaagaaggaaaggtaaaccctaaaaaagtagcaaattcattatctaatttaagtaaaaaaggtgtagatgtatcccatattaatacaaactcatcattgtataaagagtttgttgatgataactgttgatacaataggaattacatcttttaaacgaactgaaaatgatataatattagaatcttatgcaagttcacctgattcagatggtgtaggagcaagagctattatggaattattacgtttaagtattaaagaaaataaaatgcagttgtgtatgacatagaattacctgaagcaatagagtatttaaaactttaggatttaaacctaataaagatggatacatcttaagaaaaaagatgtaaacaattcttaggtgattatagtgattttatttagcactatagtcatctattctattgtatttattctatatattgtattaaaacaatttatataaagtctaatatgagtagaatagataacacaactgaattattaaaatattacaggaagatattgaaggtaagataaaaaaaaaggaaggaagaaataaatgactttagaagaaaataaattaacattagaagaatcaataactccacttagcaaagaggagaaagaagatagtattaaagaatttagcagtttattatgtgaaatggtaaatagactatataagtcttataatgtatttagacaagaccctatggatgaaactcaacgtctagatggctctttaatggtctttcaaagtagattaaatgaccctttaacaggagatttacatgataagatgtataaacttgctttcaaaacgtattgatattttcgaagctaataagcaatttagaaaaagatgtagaagcaggtaaagcaattgagttaggtgatgtagctattatagatacagcattaagtaacatcctttcaggcaatgagttccaaggaagtatttcatttatgcttagaaaagactttgaagaaaagaacgaattagaaaagaagaagaagagaaacttaataacttataaagggaagaattatgagactatataaaatgaggtatcataattgaaaaagaaaccacaaggtaatgaggtaatcataaccataataacggttatgatagcagtatttgtagtcattatgaccatatttttaataaatatcaagatgctaaagaagataaagatagatatcaaagattagtagagatttataaaaaagcagatgataatgatggtgagactaaaagaaatatgttaaaagattaaataaggctgaagaagaacttaaaaagtaaaagaaacaaattataaagattataataagaagtcaagtaaagaaagacaaaaagaagataaagaaactagagagaaaatatatgatgtaactggtgatgatgacttaatattagtaaaaaataatattgagtttagtgataaagtagacaagcccgaaatacttattagtgaagatggaattggtacgataactgttcctgtagatagtgggtatgaaaacaaacagtaggttctattattactagtgtattaggttctcctttcctatcacctggttcaaatagtatagatggtttaagtgttattaacgataatgtttatccaaatacagtagatagcatagtagaagatacaaaaccttctattaacttaccaacggataatcctattataacaaatccagttgaaccaactataccttcagatattatacctcctattgataatccttcagttccgatatctcctgagaacccaggagataataatcaaggaaatacagataatccaaatcctcctccagggtacacagatgaagatggtggaagaggctccggtggtggaggaaattctgaaccaccatcaacggaagaaccttcggataatggtaacaccggaggaggagattgggaagaaaaacctgacccaggagaagaaccttcagataatggtaatacaggaggaaatggtggagaagttacgcctgaacctgaacctgaacct

SEQ ID NO: 12 - DNA, 2049 bp, Bacteriophage
ttgtcataataatcaaatccttttctgtttgttttgttatcttaataatatcatggtttcaagtgactgtcaatagttttttttaaactttttttatttaggttggaagcggttgaccgcttcccttaccttgtatcttaatattaacatctattgtttaagttgtcaagccttattttgaatattttacaattttatttgctttcaagaaagtaacatcttgacggtagttttttaactcttctgtaaacctttcattatttttcatgccgattaagtttaaagttgttgtgatttttttcattttatcatttcctttattgatttatttgttatcttaatattaacatgttgtttctaggttgtcaatagttatcttaaaaaaaatatttatattatcttgtagtagtaaaaccagtttacaagtttaggtgtgactgttgcaactaaacccctataataagtaagagaatgttatctgtttttgtgttgatttgattgttttgtttttccatttaaattttatcattttgttcaatccctttcatttggtatacctttatattaaactataatgatattaaagtcaatagatttaatgaaattaatttaaaaaacttttacatttatctattgacattaagaccgaattattatataatggaagtgataccaaaaaaggaggagtaaaaaatggttgaaaataaaattaatgaaatttggaaacctataaaaaaagaatactttaataaatataatttttatgtttctaatttaggtagggtaaaataaatgataggttgagtaaagtacatcaagaccgtgacggatatttaaccgtaagggtcaataataaaaacacatggtgcatagacttgtatatgaatattttggcaatgattttattaaatcaaaccatgtacaccatatagacggtaacaaacaaaataattgtattgataacctagaatgtattagcccgtcagaacacaataaaaggcaccataaagacaatactttcaataggtataatagggttatgcattaacagaagatgaaagaaaagccatagcaagcaaatacaagcctagaaagtacactcaacctatgttagcaaaggaatataatataagtgaaataaccgttagaagaattataaaaaatataaagattaaagaaaaagggttgaccttttcttttttctatagtatactataagtatagtaagaaagcggtaaggagcctacgtgtccgctatataagagaagaggttccgggaaagagtggttttaaaaccatttaatataaattttttatataataatttttttatactaaaaggtcttcacttcattataccataaaaaatacaaccttgtcaacagtcaattttacactaatttatttattaaataatttttttatataaattaaaataaataaaatccctagaaatctaatcctagggaattgtataattttttttatattattgtattgcacttctattatatcttaatttcataaatttattataagtttgtttactgttaaatataataaattcatctgattcattttaaatatattgtgtacagtttgatagctcatatatccatttttgctaaattccataaagttttatatcactattatttttttctattttaaatttcatattatcatatccttttatataattttttatttaattcagaagcggttatattcaaccgcttcatatttaattttattgactaattctatttgttttaacttgtgtgtaagcatattctagagtatccgctatattataactttgaatactacaccaccgccaaaccatttagcagtatattttttaaagccgtatagtttattgatgttgtcatagtctgctagtttaatatctaaatccatgaaatgcactacataacgtgggttgccgtttgcgtcatttggaattctgaaagccgtaatgtcttgcccttgtactgtgtgagtttcttcgtataagtaattttttgtttgtcataataatcaaatcct

SEQ ID NO: 13 - DNA, 49223 bp, Bacteriophage
ctgctcttttggttaacgcaattaatgaaatgattgatgattcagataagcagaatgaaaccattcagaagcaacaagatgaaatcaatgagctaaaaaatgaagtagcagaaatgaaaaagatgatcgaggaaatgcaatcaatgtttattcagattgctaagtaataaaaaaggagcctttcggctccttttcttttatcagaatgggatatcatcatcaaaatccataggcggctcgttgttttgaggcgcttgctggcgtggcgcttgttgttgctgtcgaggttgctgctgttgtggcgcttgcccttctccgcgttgactgaataaaagattaggaaaacccgccgccgtcaatgtgttataaatctgcccgttgtattcctggctatcaatgcgtaactgatcgcatgatacagaaataactttaccctgctgaaatgcttcacgataccaattattcatgccgtcgcttttagcattaaagaagaatttgtaattggtgtattgtcgattaccttcacgatctttaaatgactccgaaagctcaacgatgtataatgtgccgtttgcgccttgctttacaaatggctctttgcgaatttctccggtgattacgtgcattcttaatccttattggggcgttaccgccccacgttaatttattcaaagtctgtgatagattgagattttacttcctgttgcggctcgttttcaacattttccttcttcgcaacattagccgctggcgctgccggattaaaaccgcgagcctttccgatttccatttttgcttttagcttgtcgtaatgctctttaatgattctcctgttagccgcgtcagattgcttgtaagccgttttaaacgtttcttgcaagtctgtaaggttatcgcaaacatcaagatcttttttccaatcctgcgcgtttttggtggcaagatttgcgtcatcgtcagccgttgccaggccaagagccgtgcaaagagcataacgtctcgcatagctgtttgttgagccgccgccttgtggatctaatttctgcattggcaacgtgaaactatattcaacccattcatttgattcaacatgaatgaatcgcgtgaatacagtcattgatttaagatcttcactgactttctgatcttgcgtcaggaataaacccttatcagtaagcccaggcataattgcatcaagaacactgtcaagcgttgcatatttatttttaaggtgcgtattttgcttatccttttttacttttgtgaataactgacgcgcctcaaacaatgccttaattacgtttgcgttttgatctgataatttcatttcattgactccggtttaataatggcggcttgcgccgccgtgttaattaatgcttttcttcgttatcgttgtgataatcaatcaaattctggatcatgatttcacttgcctgattaatcatcttgcggtgttcttcgttattttccatttgaagaaccgttaacacaacgttatcaatcgaatatgcaaccttgcgaacatattcaagagtttccggtgattcgcttggatcaattacgcgcaagaactggcgttgcataattcctaatgcgtttacaaatccgcctacgtgatcgcgcacatcttgaatgtcttgctcattgaattgctgttccatttttgtttcctctctctcgttggttgatgcgtgtagtataccacgcatcgaatggcagttttagcaaaaagtgctatttataaaaaacctttgtattgacgacgaacccaatcaggcgtttgaaggtcaatttccggctctccgtttgcgtatgaaggccaaacgtcatttacctggcattctgcaaactggtttatcacgctcatgtattgaagtcgtccgatcttcaattgttcatccgtcatgcggtatgcaatcggtaaataaggctctttcttttcctgcgccagcaatctgactactacggggcgcgtttcttctggatacgctttcttgaataagtcatgttgcaatgccattttcaagtagtagccgtgattgaatgccagccttgcaaactctgacgggttagcgcttgacgttgttttataatccgtgatcacaatcgcttcatcaaatcgcgttgtttcatataccggattaccttcaccatcataaccggaaatcaccgttgcaagcacatctttgcaaatatcaacatggtcaagccttactttgactttcacgcctttgatagttccgaaaattgatagctcgcgttgtgctgttgggctattcatgcaagcgttgtgttcaggtatgctttccagtacgcggcgcatggtaacgcaagcgtcgtaatctttagccggaaccaattcaacgttatccgctcgcgcctggctttctgcgatcatttcaatgagccattgcacatttagatcctcaccacaatcaaccatcatcttaatcagatctggatacgttttcccgcttgtaccagtcaggccaaaagattttaatttcgctgccaatgctgcctggctcgtaatcaggttttcataatcttccggcgctggcgctctgcggtactcttttgcgaatagctcactactctggaagtttgtgtgtgactgcgtaccgaaaacaagcgctttgctttcctcgcgtggtctgtatttccacgctgccggacaacttgcaaagatttctgccaggcttgaaccgctaacgtattcagccgcccagcctttcggatcgtgatattcaccgttggttaactggtcaaaggtgtaaactttaaaatcgctcatttattcatcctctcgttggtatgtctgcattatatgtgaatgtttcatgtagtcaataccatttaagtgttctttttgttttgaatacgtttacaactagcattgacaacaaaatcacatcgtaagtttatgattttactaattgttgtttttgtgttccattgttcacgcatttacgccgcataccatatataaatacataccatgtgatatataaccatcaaccaacacaaaacacacaaccactacaaaccatagagaacaatggaaacaagaaggatacaaatagatatatataataataattaaactctaagtgtatgtattatatagatatttaatttgttctttttgttgtcataacgttctcaattctacgccggattaagttgtgaacaccgtagaacaaaagaaaacaaaatgccccgaccgttaagccagggcattgatttacctccttttatgctttgaatagcagtattgttaatactggaaccgcgttagcgtggttcaggttgccaccatatgaaagcgttgttgcgttacccgctggtaacagaaggtatccacttgaaccgccatgcatagccgtagcttgaacgttagccaagcgaccgccatatgatgaatcaacccaaacagtaccaccgccccacgtaccgcctgaataggtatagccatgcaaaccaacataaggaatcacaaggtgtctgtcgtagtttactgccggaatgtgaaccgatccgttaaacccaagcacaacagcctttgcaacgtcgccctcgattttttcagcgtaaacagtacccctaaaccaaccatcagtagcgtaaacgttaccagtgaatgatccggcgtttgcgtacactgtaccccttaccgttatctggttaaattcagcataaccattcttattaatcatccatccagccgcgccgctgctccagttgttagagttaatctgatccgcaatctgagcgttaccaatagagccatttttcacaagcaagctgttgataaacacctgattattctcaacaacaaacggtagtgtaaaacctccgctctgttggttgtttatgatcgcaaatcgtccagcatcaaacaggaattgtgatttaactcctgatccgtcaccaacaagggaaagagccataccagcgctatattcctgcccgttgtaacgtaaccccaacttaacgccgtacatcgcgcctacgctatcggcattaacccaagaatcaagtttctggttaaccgctgattgggtatcaccaatttgagttgataacgccctatccgctgacgctcgcgcttccgcttcattggtgattgccttgttaacatcagttatctgtgctttgatatcctgcttaacaccatcaatttcgctctcaaacgtagctgtaagctgatcaatcctttggctaatggtttcagtgctgttagcaattacctctctcaattcgctattttgagccgttaatttctcgtcaaattgcgcactcatttgagtgacctgcgttacccttgcttctgtttcgtctgcaatgagtttcagcgattgcaagaactccgctttacgcttgccgttttcaactcgcatacgtcgcacatctttatcattcgctaatgcgttttcaatcactgattccgctgtgctgtggatcttatcattggcctttattgcgttttcctgtaaccacttatatccatcagaattttcaatatcgaccttaatatgatccgtgataatgctcgtatcgtcggaagccatgccgcgcacaaagtcagtccaatcagacacattcccgattttgtcaactgcccttgccttgtaccagacaacatgacccgctggcagtattgaatgccaatactcatattgcgggaacggaacaagcgttaatagcgttgcttcgtcaactataggatgaccatcagcaccgtttggcgcttgatgcaactctatataggccgtgtctccgcttccctccggcataccccattttacgcgaattccgaaaacctcattatctgacgctgtaaggttaattggcttttccggctctcccacttttccggttaatcctgcgcttactattgcagaccatccagacgctgaaccattagccgcaacagatctaacccttacgtgatagttacccgcataaataccttcaacttccgtttccttgttcgcggttcgcggcgtattgttccagttgccattgtcttttcgccactgcatttcatacagacttgcgtattcaactttatcccatgaaacgtgcattgtttccacgctcgcgccctgaacaactcgcgaataagattcgatcttgacgttttcaggtgctggcagaatgtcaggctgcacaatggaagtagggcgatcatcaatgttcacaccataatcaatttcatcgtacttgttagcgtcgtattcaacagccgtgatgttgtatacaaattcttcatcaccatcacctttagttattcctgttactacatagcgttgctgggctatatctgtgcgctcaattgcaaaaaccgcatccggcttaacgtcaaagccaaacgttgtgtttagcgttagcgttttgccgtcatcgctcacacgcgcaatggttcgaccaactggcttaccatccggcttatttaccagaatgcgatcacccgctcttgcgtcaaccttaaacggcgtgaacacctgcaacccgttaacctccatcaatcgacctgatagattcagcgtcaaagcgcttgaccagaagttatccgaaacaacaattacatcgcctaccgttgggatcataccttccaggccagtagcaaagtttactgttgtgctcttgacgttggttttcagaatccagcgcccacggcgattagcctcactacgtcgagtgcaaccgatagcagttattgacgtgctgttatatccaaagcgtaacgccgcctccgtttcgaaaactccctcaacatcctgttgatacatgttttgttcgtcgtcgaaagtcacgttacattgcgtgtacatgcttttctcgctggcaaacgtgtaagtaaactcaccattaaccacgttgtcattggtaaagatgtatgacgcatcgcgcggcttatcgatcacaattgaaaggctttcaccgttccaaaaactcattcctcgaaagattgagcaaatatcacggacaagctgatacgcttctacctggctctggatcacaacgtcgcaaagatagcgcggctctgttccgcctttaccgtctggaaccatctgatcgcaatactgcgcacattcgtaaatgctccatttatcaagcgcgatgcctaattctctttgatcgagtccgtaacgctgattggtaatcaaatcatacagaacaaaagcagggttattactccatgcctttttccaggttccatcccatgaccctgagtaagtgcgggaaataggatcataatttgacggaacattaatgattttccattttttcttaatgctgatattcggcaacgcattagggaataattcgctgtcaaactcaacatatactaaaccagtcagtgggtaacgaaatttagcgtctacaacttcagcatagctttgcattttaatcagatccgttacccttgctgacgtgctatctgtcaggcgacggacgcgcaataaaacacgctcattgaaagcaggtaaatcaattcggcggcttctgtcgtaaccgctcattgttttaccttcaattacatcatacaaaacctctttatattcagcaccatcaacagccatatcaacagcatattcaacgcgaacgcctgttaaatctccgttatcctcctgcgtaaaccctcgcggcattaaaattttaatacggatcgcggaaaggtttttattagtcacggaaataatataaggagttgcagccgtcagatcgcgagcaacagtaatctcactcgccgtgtcagtgaatccctgaatataatcttgcgtttgtgatcctggtctgaattcggctttaacattctgaaagtttagtgacccgtcctgattcataaccggaacgtcatcaaaatataaatcttttaatgaaaagtctggatcaacttcaccatcagaaacagctaaaagaattctgatcctgttaattgaaatcaagttatcttccatttcaacaggtgtgtgcggtttagatgaaccgcccttactgccagttatcatatttttaaccatagcgtttaacctttcttgctatttaacgtgctgtcattgtacatgtaacaaaaaacccgcgcaacggcgggttaatataattagagtttatcttctgcgtatgatccagcactaaatatagcgccgccaaccgttctataaccataaggcaacggaaccggataacctgccgccgtggtattaacagcaccgccaaacgcataagacggcttgttagctgcgctctggctttccattctcattcctccttgttgtgggctaatcatctgcattactccgccaagagccattgcaccacccatcataaatgcagccgatgaaaaagcacccatagccgccagcgatgcaccaccagtgaaaaacgcagtgaccataataacagcacccaatacaacctgaaataaaccgccgctttttgaacctgttggaaccggaacaattcgaacctcgcgagcgcaacgccatgcgctatcattattcaagccaacatttttaccatcaacgaaaattgcaaatttcatctttgatccgatttcactttgcataaattctttgaatccttcaacctggcttgataatgcccttacgcattcaggccaactctcaacggcgtatttatggaaaacaccaaagcggcgacctaatgagcctgataattttacgttgataaccttattcatttttcagatccttatgtctgcaaatcattgttgtgtgttcctgataccatccagaatataaatcaactcgcgacaacttgccgaatgcatgatgcaatagttgattgttgcctaaataaattcctgcgtggttccatactggcgcttgcaactgcattatgatcatatcacctggctttggtggctctcctgtttctataaaaccttctttcaagtaattatcttgataaaggttttcaccatgttccggcttccaccattcatacggcttacggaaatcattcaggatcacgccttgctctttatgccatgccataataagaccccaacaatcataagcaccaagcgaccaggggcgaccaatcaaaggccgtgattgtggctctatgattctcatgtctccttctggtatcgaaacgataacccaagaaacaccagtttcatcacacatgcacaaatcgtgtgcgctagggattgtggttgccccttcccctgtgtggctgtgaactatggcgataatatccgcgccgctatcctcaacctctgcgtattgtgtcgcgtccatttcaaaatgcttttcctgctctttgcttacgttatcgatccggtgatatttctggacgcgtgatttttgagttaccaggccgcaacattcattaggataaacatcattagcgtgtcgcataatttcaagtttaatttttgcattaatcattggtttttcctcaacagtgaagcaacagccgctccgccgaaatctaattcattttcaggaccaaaacgcaatttgcaagctgttaccgttccggcgcaataatccttactcggatctgttacaggattattatctttatcgaacattgcagatccgttatatccgcaacctttaccgcttctataccatccacgttgcgcccaataacaaacgctttgcgtaagtcgtggcgggatcataattccatccatatcataaggtgatgttaattcaaaacgtgcaaccgtctgattaacaaaatttggacgctcaatataataaaccagttttctatatgcgccgtcctccacattaccttcatcatcaattaaatcagccgatgtaacccaaattgttactttggcttgcatcatgccattatatgatctgattaatgcagatacgcggctatctaaatttgaaagcgctaattgtggtttctctgcctttccgttacttgtaaatcctatgccagtaatcccaaaaggccgcgccccgtaaacctcaccacggaatttaatgtctttaggcggcaatattccagtttcacgcgcttgcattaattcctctggcgtgtacgcgatattttcagcatgaaagcggtaaacctgagcaccaaattttgtgccgtcaacctcgacaagagtaataatctcaccaggaaaaagcgattgcagacaattttcaaaagtctttttgatctgtttttcatccatattttatgccctccaataaagcaccattatagacacaataaaaaagccgcacaaggcggctttgatttatcgcattgatgtaaattcttccgtaaaagttgctttgacttcctgagcggttcggctaattggcgttagtccaaccgttccggcttttacggtaaacaacccaaaactaccgtctggagttttccacaagaaaggctttaacctgtgatccgtcataaatgctttaacagccttataatcattgccaacatatacaatagaaaactccctcctttccgtgttaaatccagaagatgccttttggcgatagccgttaccaaaaacaacttccctgtcgttattggtagttgtcattacaccgccgccgctctgaatctgcgtacaccaggtaaattcatctaacattaagccctcccatgaacaaaattataaacctcgccaccttgcgagcatgaccgttgaatcatttcagtgaaaatcatcttgataccagtttccatcccttttggatcttgaccgttgtcaatgttaacgttgatatcaccaaatgcaaattgcgatgcaccgcgattgatgccagcgccgccagttgtcacgcttcctacttgaccgccgtttgcataacctcgcatcatgcgatacaggtttttagctccgattctttgcgttgcctctttggtgaaaacaaactcacccttatgaacaacgccagccggatcatatttgccaccgtcgccagtataaccgccgccagcaaaaccagcaccgcttaaaaggcttccaagtgtccaggttgagccgcccatcatgccggaaatgctattgaagataaccatctttgtgatcatctgaacaataaggctaatgatcgattttgcaaagtctttgaagtttgcttgtccagtagtcaagaaatcagccatttgttgagataggccgtttaacgcctggctcgcaatgttgccgatattatcatacatgttcattgcttcttcgccgtactccgcaaaggcatgttttgcaccagataaccaatcagcacgtttagcatcttcctctttatagcggttgtctaattcatccatcatggcggtgagttgcggatctccttccttacctcctttggcaagataatcagcctcaacctttgcacgttcagccgctcttgctgcttcacgctcgcttaaccctctggttttggctagtgcttctgttgctgctttctgctgctggataaacttgattgagctatcttgcaactgattaagtcgcgtttgtgcaacaatctgatctcctaaaatagctttttgttcagccatcgccaggatcttatctttgtttgctaaaatgcttttttcttcatcagtaagttgccgttttgttgaggcctcttgcagaatctgaattttagcttgttcagcccataaagatttacgttgctggcttatggtatctgtgatcgtcttgtgctctttcaaaactcttaattgagtttctaacgccaggatatcacgctgatattgttcttccagcttatcgccagccgataccttaactttttcagccttttgctttttatcgcgtttggctaattcctcggcttccttcctgatattctcctttgttttagtagcatattgctgttcaaccgccgcacgatttttcatcatgtcaatgtaaccctgctcgccttttttgactcgctcgttacgttctgcaattgattttaatagctccttgttgttctctttggcgttattaatgatcttctgttgttgcgaaattacagaattgccaacattatcaagacctgggattttttgcatcgtcttagttgccgacacaataaattcaccaatgagaatatcaccctgattaagcaagtatctaacctgctcaacagttccggctacaacgtcgataatcaggttaagcgccgccagcgtgtgatctccaacccatccccaagcatctgacgcccattttttaatgttcgtccacatcttttctaatggcgttgcggagtctgccagtttagctaatctcttatccataacatcagcaaataactttgtcgccgccgtcactgcttccgtttttcctttcgttttctccaggtctgcaatataagttaactgcccttcgcttaaaaagttgaattgctcgtttagctctgcaagacctttaaccggatcgccagcaatcttattaaagtaatcggttatcttgtcgcttgattcacccgttaccgttgaccactgagcggtagtctttgtgatcgatttaatctgatcaatcgtgaatttgccggattttgcaagctctgttgcgatggatcggatgtttcctatcgtcgcatcagtgctgttattaatgtcctgcgccagcttatcgaactgtgcgccgcttgtgccagcatagccaccagtcagcaccaacgcctcttgcaagtcacgttgcgacttatacgcatcataaccagccttaacaagagcacccattgaaacggctaatgcggcaaggccaacgtttaccggattaagaaacgacaacagcactttaaacgtattaccaacgccgccgaaagaatctttaatctgcccaccctgctggattgcaaccaaccaaacaggcatgccggaagccagcgacgttacaacgtcagtgatctgagccggaagttgtcgcattgcctggttatattgccccgcgctaattccggttaatttcatctggcgctcttgcgctttaagctgtgcaatgaatggcgcggcctgagcacttacgccaagttgcgcggctttcatttccagtaattcagatttggtttttccaagagccgccgcctgtgattctagatccgcaaggaagctctttcctgctgccgctgctttctctttggcgcgtgattcttccaacgctgcgcggccttcttccgtaagagcctttttgttgcgctccaatttactgatctgagtttccaacatgctccctaattggaagaatgtttcatcaggtacaatccctttttgccatagcttatcaagatcacttgctgcctgtgacagcttgcgcatttttgccgctgtcggatcaactgtatcctgaattctcttaaattcacggctctgtttcgctaattcatcggctaactgtttagccttttgctttgcaacttcttcctcgttaacaaagctctcaacgcctttctttgcttcgtcgttggcttttttaaagtcctgtaacgacttaacagctttgtttaactgctcgacgttcacgccaagtgttaaacctgcaaattgttcagccatatattttaccctcataaaaaaaagcgcccgtaggcgctttatttgttatttgcttgcatcatttccagtgctttttgttccatgatgcgcaagtcatttaaggccatttcttcatcttctattttatagattctgaataacataggcaaaacattataatcaaaaccgtaagcaccagcgccagcactacgccactgtgtacccatcgcgcaaaatatatcccatgattgcatcatactttcatcaaatatgacctctggcggatcttctccttcatagtctgcgcgggttaatcctacggcttgcaattctgcatctgtcggcggtttctgataatacagataaaccgcccgttttagttttttacgcgttgccctgccagcgcacttaaataagatcccataagagccagcgccgcgccaggataataatcaactaacagttgcgcgttttcttcgttgaattcttcctccagatcccaacccacggcaacattcatgatgaattcaggatctttaataccttctttctggtaaagctcttgaatctcgctggcctttttatgcttaacggtaaacacaattttttgctcgttaccatccggcaatacaaatttaactggaagtttgaaatctggaagcggggcaagagtcaatttcattttagccattgtcatttctcctgagtggttaaatattgaggtgatattacatcaaataaaaaagggacgcaatgcgccccttaatattaatcctggttagcagggaggaaagtaaagcgacctttcagggataccgacaaagaaacggtttccatttcgtttaccgccgtttgtgggatctcgttgaaagaaagcacaccagcccaaaggcgcatttctttcgcttttggtacatacatgcgcaatgctttaacgtcgccggattcgtcagccttacgcaatagcggataaatcgggttatcgtattcatgcgcaaatgtgtaagtcagtgataccgcgcttttataggttggtaactgctgctcctggtcatcgctcaagcactggtaattgtaatactgttgctcgcctccgtcctgccccaagtcctgtacgcatgggatctctgtccaaccgttgattttcgcaaagctcgcagttacagcgccagccgggaaaacgttagtatcggttgtgtcgataccttcaacagtaaccttagtttcttcagccgccgtcacacgcagaacgcgatcaagcaatttaccccaacttgaggcggtaacgataatgtaatcaccctttttaaagtcagttccgccacttgcaacagtgaactccggtttttcagcgttgctaacgttggttgcgcttactgcctgtgcgcgagtattctcaataaaaatctgtgctccgttaggtaagtgcataatagccccctttattaaccatcataacgaacataaaaacgtactggataaaaccagcctgattctgatttctgaacttgatgcacttttgcaccttctgaaatatagccattcgaaagcattttaccatcttcaaagaaatcagcaatattttttgccagcttgcgagccttatcaattcctgaacctggcgggaattcaattccgatctgaaccattccaatatagctaatgcatttccttttcagatcatgaattattgtatctgcttctttgtagtcatatttaagccaaatgcctccgccttttggtggcgtaaattcaacgttttcataagctatcatatattcgctttcgtattcttgagccagcgccattcttgccgcaacagataattcatagtgcatttttctttctcgcctcccttatcgcttccgccatgtaagagcgcaaccggatcgcaacgataccaaataccccagctggcgcttgctttgaatgaccatattcaagagcattagcgtaaatcagcatattggaaaagtatattgatttaatagcgccgccgccatgcaataaagcataaagcgccctgcgaccttcagcttttgttttctcaccatcaggatcatattgattgagcgcgtaaagaggcggcttgtttgctgtgatctgcatattggctttgaatcgtcctgtatccactggcgcaatatcaactaatgcgccgtgaaccttttcaccaaaaatctgaatcacgtcattcaatccgctttctacttgctcgatccatttatcaacattgccatgaaattctcggatcgaataatcagccatgaaccgcaaccctccgcattattggacggtaagcaacggtaatgcttgttggtctgattggtcttgtttcaaccataacataacgctcgccgtcgatatcaatctgatatccgtttttaagctctacatcagcattaaaaacgcctaacttgtcggtaactctaattgtctctccgtcaacttctcgcgtccgtggtgctctcacaagacctttaatcttcacctttatttcaggtttttcaacctcaataccgccaacaatttcaacgcttccaggctgagtaatgcaatcaaattcaccagttccatcgctaaaaaaattaattccagccgatgccatagatctgatttgttcataattcatcgtgagcacctccgacgaaaggcagttgtaaggccaaatccgccgccttttttcttgttaagaacttcatacattttaccccacggcgtttggcgcaacgtgttaccgcttgtgtcgtcactaactttgctgaatgtctgagaaaactcaccagtcagggaaaatgacgctatacgatgcgagtagctttctacgctttcaccttcctgtttcattgcgccgtcaagagtcatcaggtgcaacgtataaagagcaacagcgcgattgtacttgtctttgaagtggttaacgcaaacgaaatcttttgctaattcgatccatgcctgaatcaattcaggatctacttttttaaatgctggagcaagtttataaatctgctctaagatctcaatatcattcatgatttacccccaataaaaaaggcgctaaataagcgcctttattaattaatactcgccgccgtcctcaagctctttttttgtcttgccttcgttcggatcttttttgcgcttgctcttaaacgcttcaacgatttcagcattgagatcgctgttatctttgattgttagcttaccttctgccataagtgctttagtgccttgccgctctaacacgctttccgcaacggtaatttctttacctggcataacgtcaacgcgatcaataataatcagtgcaacgccagtgttaaccagtgtaatttctttttctttagccatttgtttttctccatatataaaaaagggaaccttttaacggttccctatattaattgaattatcagcctactacaagacctttaatcagaaccagcgtcaacggacggtaaatcgtcaggccagtacatttagaggtgcaaggcactttgaaatgcaggtctttaggttgcgcggtcagcatgttaaacgcttctggaatctcaatgctcatgttcatcggatctttttcgtaaaccagcgccgctttagtccctgcgccgtcaatatcttcaagctcggaaatggattcgatagtgatacctccattctgctgcttgaagtaatcaagatagctcatggtggtttccggcatacgaacgctcaaaaccttacgcattgacggcgggatcagaatgtgagtagcgcggtgctgcccgttggtcagcgtttcgattttttcaatcgcttgctctaattcatcctgtgctgtttccggctttttaccagtacctgcggcgttgttccaacctgcggagttgatagttgtgatgttcggatgttcaaacacactgataattttgtgcggcttagagcctttgaaaaccaggtgattgacaagctgatcatgcgcattctgtgcggcgtttgccttgcgagtggaaaggctcttgccagtgcgttgacctgctttgatttcgtcaatggaaatcaggaacgcattaccaagtcggaacactttaccaaattcagaagtcatcatcgcgtcaacagttggcagatcatcagtataatcagcgatgatttttgcgtgacctactttgtcgaaagtctggtattcaaaagttttatcagtatcggaaagctcggacgttacagggaatacacgcagtgcggaacctgccggatattctttctcataagcctgagacttaattttgtgtagctcttgagccgtccaaatccccatatcagacgcatcgtttttagcgccttgcagttgcaggtgattagaaatcacagacgcttcaaattcatcaaatttaattttttctttagacataatatttcccctcatagaaaagccgtcacaataacggctttaatatagcattttttgttaaacgttcaagtgttttttgtgttagcacgctacaactgaactgatagtaaaatatatccgtgtgaatatcttacgtattcgccagtaaaaaaccaactagtaggaaatccacttgttgatatagagccattgtctttaacaaaaacaggatctttatacgatggaatatcatgttcgtcctgagtgattacccaaattcgaccatgagttattacgttaacaggatctccggcgtcgtaatattctttgcaaaaatccatataatcacgcgtaacgattccgtaatgctttgagttttcattaaaattgtggctgattattttgtaaccgcaagatatgcgatcaacacatacggccttacctatcacggctgaaacatccataactggcgagccatctatattataaaggcttgaatctaccaagcacccattttcaactatacctattatagaaccgtaatcagacataaaaccaccatatataaaaggccggaataatccggccttattattataccagttgaacctcaacgagttttagaccttggaattccgtaaagtctccagttgcgatccaagtggtttcaattaatccagacgttaaatcaacctgtcctgaatcatcaagtttgatagctgttttgaatgctggcgcttccgactctacagataacatccaaacgcgccctttagtcattacgttaattccgctaccagcttcataaaccatgcgaccatctttagatgtggtctggaagttggatcgaatagcaacgccgtaagccttgccgcttgccgccatcggcttaatcagcttattgcccatggcatcaacgccgccatgctggaccgccacaccaacaaaaacaggcttattctgattgcctgctgcattctcaagaacacaagctccgtcgatgttatacgcggaagtgtcggaaacttgaccaggcaaggcgcgagccattgcaacatgataacttgctgaaatctgagccataatattttctccttatttagctttgttcagacgcgcggaaggatttaaaacagaatccgcgccatcttctttttcttttgctgaatcgcctttcagtgcaatacgttgagccgccattttatcagattctttcgcgatatcaaaagcggtatcaatatatgcatcagcctttgcgctaatgtcattacccatgacctctttcacatatgcgatcttaatttctttggctgttagtccgtcgcattttacgccaacttcggaagcggtagcgaccagtgcggcatgttcatcagcgtcagcttttgcttttttcactgcttcttcaatctgcgccggaatgccgtcaactttcgactgtagcgcgtcacgctctgcctccaggctgtcggctttggttttggctttttcagcatctgcctttacggtttcgataaaggtagcaacctcttttggtacgtcaaattcaacagcaccatccagtttaattttaacggtcataacttcgtcctctttatttaatttaacgtcagtatcatacgggaattcctgctcgctatcaagattcaattttgcaattccggcacgacctttaaaaacaagcgcgatatggtttacgctaatgtttgtttgtagcgcatcaaacttaacccaatctttcggcggctgctcaccatcttttagatcttcttcaaagatgtattcgcccgtttcattagacccccaacctggcttatcaatatcaattgaagtatagccaacgctgatttcagccgtttgttttttcttcgcgctttcaattgcatcctttgcgtaaatattcaaaggcgcttcaactccgatcccatttggaatgccagcgcctgaacaagtaccaactacaacatcacgcgcattttccggcgttacggtgacgtgacctactgtgattggtttacctgcgtaagtcgccaggctatcagctttaaacacttcacttgctggcctgaattctctgcgctcgccgtatggcgtttgataaatctgcaaaccaattcgcgccacaataggacgatccactaaaaagccgtgttcatcaaaatgcgcctttactctgacactatcaaaacgttgcaccttcttcataaatatacctcttgctctgtttcccaatccggttgcgcccaacagcgacaattatattcctgccctgggaatatgtgctttattgccaatgagatccgtttcatatccaatttagcgtgttcaggtctaaccctgttatcttcctgagtgcgccaaatataatgggtaactccggtatcaaccacgcgttgatacattaacacggaataccacgaaccaacaaaaccagacgccctatttttagcccacgccttatattttcttaggcgctttcggatctgcgctcttgtttctgcttgctcgcgtaactcatttaaacgctgttgtacttcccaatcatcaagcacattatacgcaaatttacttactgatgcctcaataagtgatcgccaggttatgtattttgaattgaaccaacgttcattcatatttccgtaaacgccaccaatcagaaggataacggatcgattatttgcacctcctgtttgctttgccattctgataaattggcgagtgtggtatttgtatgcactaacggcgaacccgtaaaccagcaacataaaggcggcaattgccgcctctacatcagcattgttttcagtgatatcaaccgccagatcattaagcgccttttcaacgtcgctctctgtcatatcgggaaacatcatttattcaatcccccctcttgccctggctctggatctaaatcttccggctctggcaattcaatgttgtcattgtccatgattttaagatctggacaaatggatcgcaaagtgtctcttgtttctttgagattaattgcctgttcagctttcaattttacaacagattcaacgttcttagccataatttcagctttgtccttatcgctcggaacgcttaacggttcgaattcaatagaccattcggattctgagatcatgaacggcaaaaggaattcaagaatcggcttgtaatcctctacgcgcttgcgatcaatcaacttatagaaagtctctagcgccgtgttttgactcgctgaaactccgccagtgttcttatttttaaggatgatttcatgaatgccagttagggcaacaattcgatcaatcttttcctgtaagaactctggaacgccggaaacgtcagaattgagaacctcatattcttcatctgtggcatcaataccaattgccttaccaactccgctttcgtcatcaacctgagccaaacgcaaacgcgccgcgtagcgcccttcttcatcgtcgcacatcaaagccagatcacgcgctttccatactgcttgttgttttcggcgtagcaattgcgttgctaattcctggcaatagttataatcaacaatcgcctcaatcaaacgcttgtttaaaatgcttgcgccccaaccatcattttgacggcgtttttcattcgatactcgctcaccatcaatgatgcaaatacgcgagtaatgaacaaagaattccggtatatctccgccaggtgagatcttataaagtttcggctcaccgtaacgaacactccgcgcattagtttcacgttcctgaatggtgatctgatagcgatcatatacgcgaatatcttcaagttgtgcaccaggctttacaggtgatttcagcattctgttatcagcaacaacagcaagaattgcagaaccgccaaataaacgcgaccatgaaagcgcatcaataattttagcgtttaatcgcaattcatcccagcgcgatttaaaagacttttcatttttcacgccgtcaactttaaaaccaggcgtcaccatttcttctggaataacatcgacaatgcgccgcgccattccatcttcttcataaaattgcgataacgttttaaatgccgcactttgcatgtaaaaagcatttggcctaaacgttccatctttagatccgaaaatttcgttgtaaccatcttctttagtaatggcctttaccttgtcgctcataaatacccccataataaaaaaggccggaatattccagcctttgattttacacattaacgcttcgctaatccagctaaacgcttcattctatcaaccgcattatcagcaaggttaagctcaatattaaccgcatcaaaaaggttatccataatatcatcatgaggatggctatcatcataagtgaatgccgccgcctctgccagaaattcagcaagcatgtgatgcgattcaggcaatacaacataaccattcttgatcactggctgagcgtccatgcagcgcgttactttgtctttatcgcgttgcactggcgtaatttctatcggaaatgctttgcggcaattctggatcaaacctgtaccgctcgctttatcttccacgtaaattttacgcaagtttccgcattctttgttacggttccagcactgtttaacaaacgctttaaactgcgtttctaacattggcgcttcccattttccgcgcacaccgtcaataaaatatatacggcctttgaacatgccccaataacataaaacgctgtagtcgtttagctcaccttctttctgagcggtatctgctgtaataaacgtataatcaaagcgatccggttttggcatagttgatttttctccggttccgtaatactggaaccatccaacgttaattgcgttacctccaagagcaattggatcttgctgatactgagaaaggaacgtgtacaaatccgcatcgcgtagcgctttcaagtcatgaatgctttccttgctaggccaaaaagaataatacttcacgccgtcaataacgatgtattcagacgaaagcacatccttttcaaagtgcggctgcaaccaatcaggaagtgatttcccgtactcctctgtaaccatagccggaattgatatctgatcaaattcaatacccattccgccattcatcagaaaccatgtcatatcctgcgcatgtaaacgctgctggataacgataattggcgtttctgaatgtgcgcgacgtgatcgaatggtgttcttcgctatcatctgaccgcgctcacgcttcaccttcgaaaacatatcatcgggcttttctggatcgtcaagcgtaacgcaaccggaataaataccaggagtgatataaccgccacggctaccagtaatttgaccgcccattgatttactaatcatttcaagtcgaactttgccagcgtcatttaaaacctgaaattcatcatctttgcttgtaccagtttttgcagggaaaagctcttgccattctcgcgaattaaccagatcacgcacacgcttactgtttcgtttaacaagcgtatcggcaaatgaaatatttaggttccgcaccttattaagttttaaataagaatacggagggaaatggatagaaagtaattccgtcttacctgagcctggagttacattaaagatcgtatctttccgcgtaccttcaataatttcatcaatcgctcttgcgatataaaggtgatgccagttaggaatccatttttccccttgctggatcgggaaccagattttaacgaaagtatcaaaatcgtgtgtactcaattctttaatagccagcttttctaacttgcttaaatcttcccatatcaacatagcattcacccttaaattttacttagaacgcttgcgacggcgtttttcattgcttcttccgtgttaacttccgtttcagcattggcgctaatattgaacgtgtcgcctttatcaatgccaagctcttttgcgatcatggtgctgttaatcattccgtttgcagctaactggtatttttgttctttgattaccgattccgcaaactcaataacaacatcatagcctggtttaagtttccactttgctagtgctgtgcctgaaaaaccgcaaaacagctttaacccttcccatgtaaaaatacgcggcttgtgaatcgtatcctgatacactcgaccctgaaaggatgtagtctcacctgctttaatggcgtttagctccgcccactcaaaatactgaacaatcaggttcatgacttgttccggcgttagcgttgcgcgtttatcaatctcaatacctaccagatcggaatatcgcttattccataactttttaaagtttagactttccgccgctggcgcttctgtttttttagccataataaaatcctcctgttgaggcgtgattatagctaaattgcagacacaaaaaaacccgcgcaaggcgggttgtctttttttcgttgaatcaatcaatatacttgatgcttccaggcttgccaaacttgcgacggaatgcaatttcatcagcaatcttttcaaagtttttagtaatcttccatttatcagctttgttttcgtaaatggcgatcactaattcgttgtcttttacgcaacgctgcacaccccacgaaaaacaaagatagagaaagaaacagataatcgcacaaaaaccaaaaccagcaatgaacatcagcattatatagccctcacataattgattgaaaattggtgtgtttcagggttagcacctgaaagaactttagcgcatttaaccgcatcaacagtgtttagcgcttcaacctcgcattcgaaatcttgtttacatgatccgcaattgcgacccatgcgccggatagttagcttaaccttgaatttcatccggtttatcctcttgcaatttcaccatgaaatcaccgatccggcctaacatcgcctcaccttgtttaaatcgcttcttgtatcgcgttttctttccgtcacgctcgacgatgatagttacctttgcgatttctttgttttgcatcgtgaattctcctgaatggttgcgggttacggttcccgcgatggtcgtttgctatgcaatcccatccgattaggttttacggctaacgcgccgcgctttgctctattgagcctcttatgttcacggcgtttaatctaccaatcagacaacacgccgtcaaccttcattgattcaagtgcttattattcatactcgccaggcttaccccatcgaccagctatataaccagcaagccatacaaactttgtgcgagtgattaaggtagaaattggcgtgtgatgtttggtgataatgccagccgcaatatgatcgtatttgttgccgctcgtaacttcaactttcagatccttcatgcactcttttgcagcgcgtttaacaatgttgtattcagcctcattaagtccaaacattttaaagtcctcttgatttccaaagttgaaacatttcaaagtagtgcaatgctgtgtcagtgtcgccgcgctctaatgcttcttcttgcttatgtgcgcaccactgcgacggttttatgtattcaggcatagaatcaccttcctaaaaaattcgcctcttagaattcgtctggaggcgattaaaatcgatgcaaattcgttaaatttctgcgagtagctcgcggaggcggtttagcactccaaccttgtataaatcccactcgatagaacctggctcaagctcacgcgccgaacctggcgctttcgtgctgaaatcgtcaatgatacatgctacttcatcaacaacgatttcctttatctgctcgttaatgcctaaattctcaaccgattcaaaagcctgaacaactccacctaaaacgcgttgctgtgcttgcgcttcttctaacgtgtcgtgaatgtttctgatctgcttgctgccaaacttgccaactccgtaagagtgaatgtaaatcatgctaacacctcgtttttacgcttccacttttcaacatccatttcgttcaatccgttttcgtgccgccacactgctaactctgccgcacttgttgagcgtggcattaattgctgctcaagctggatgaaaacctcttttgcaacatcgcttttaacatccaatcgctcatattcaccagagccataacgccatcccaagctatttagcaacgatttcgcttgttcttctgataggttgattgcgatcatctgttattcctccactgcgtaaaacttgatgcggttgttatcaacaagaaacataacgtcgttatcccatttgtcggcctctacttcataatattcctcgctgtcgtcatcagccaggataacgcgatcttcatcaatgattagctcataagtgccgccgtaaatcgggttttcgctttcaaacatcttgccagtgtatacagccattttctaaatctccgtgtttcgcttcaatgaggacactttaacaaatgccctcgcggaagttttaacaaaaagtgctatttgcacttcattcctgggtaaacgtcaagcaaagcatcagccaacgtccttacaacctttgcatgagtcactatattctcaccttccggcactctcagcacttcacgcagttgctctaacactttgacgtattcgttaggctctgagttaatcaacgcattgaatttcgcattctcaattacagaatcaactgattttgcaattacgcgatcttgaattccaacagtcatttcaccgcgcattgatttgaagatatcgccaccaggcgaacatgaatttctcacctgctccgcaacgatatcgcgaattctttcacgctctgctaatgcacttgcttcatctgcgatccgctttgcattgcttaggtgctcgctttcgaaaagagttttatcaagccaaactctaacgccattatcagcaacaaccaggtaaagagtatctatgctattcaaaacggtatagtcgcggccttttgtcaggtagttataaaaatcatttttagctttcatattttattctccttacaaacaagaaatttcttcttctgcgaaatagtcatagtcaaattgacaccaatccttcaaaggcgtatcaatccactttgcgaaatcttccagaatttcggagttgtagttatccgcaatgcagcgaccccagtcgcgagcatttttataaccgtagcggctaaacgtgtaaggcgatttgttagagtctccccaccttttagcaatcttagcaaaggcgcgtaccagcatttttctattcatcgttttgtctctctgcgtaaatgatccgaaagtttgttcttatttgttgcgtcatcactgccaaccatgccaccagcaagaaaaataagtaatcctccaacagcactttgccaagtgtcattgtcagtaagccatatgccgcacacaagcaatgccacaaaaccaataaatttaatcatctttttcgaccttaaccggagtgtttaaaacatacgttttaagagtgtggccttttgaatccttagttatgatgtttaccgtgtcgccgtcgcgtcgttcttcaaattcaacgccaggcacataaagcaaaccttgcggcgaatgaatccagaacatttttattcctccacgatctcaaattctgccagaacgaaagagccaacatttacagataatccgtctttaccgtttaagaagaagtgaccgccgtactcatgcgtaacagttgggctaaacccgtttacaccttcttccatatggtaaatcgcgccaactgtcagattcattgtgtttgatttggtgcatttgattttcatcgtttattcctctgattggttgcttctcttgaataaggccactataacaaatggccttgcgcaagttttagcaattcgtgctatttaaggtgatcgcgaatgatttcctttaccgttacatttggttgtttatcaaccaatttataatcgtgctcgctatatccgtttttctggtagtatggatttattcgaatgtagttgcggctatcacctgcaaacgtgaacccgtcgcggtgcaagcggcataacttcacctcattaccagcattgattagcgctataatttcatctggaaaaccgccatcagtgcaaacaacaggagcatcacactcttttactttctgattaaaccttacgccgaaataatccttaccgaatttaggcttgatcacatcctcgctaatccagatcatgaactcgcgcggtgacatacccatcaggaatgtttgcggcctttctttctgctctctgtaatcgtaagccagcatgaaacgctgatagttctctttgcccaggatagctaatgcaatatcaaacattggctctttaaagctaatgattcggcattgcttaccaggcgaatagacagaaatcatcttgccaatcgtatctttgccagcaccaggcggcgcgttgaggataataattttagccatctttgttcaccttaaaatattgcaccgttaacgtttcttcgatctgactccacccttgatttctagactcaatgcaaacatcgtttaatgctgcctcgcctttttcaagtgcatcagcaagagcgagtaaatagttgatcgtcttttgcgtttctaatttattatcaagcgtcatgaccaaacccccatgaaaatagaaccaacggcaattgccacacaaacaataacggcgataacgtgtttattcatttctcgctttctcttgatgccgtttgccttattaacaaaatccttagcctctttgttgtaaggcgctaacgagccacgattgcacatacttaccaaaacaccaggcgattgaaatacgctcttgaaaaaattatcaccatcaaagaacggtttttgtgaggcaaaaataacgccgtcatcgttaacaatgtaataatggttagttctaaatccaacagtggtaaatactttcatttgtcattctccttgcttgtctcgacaaggcacactttatcaaatgtgccttagcaagttttagcaaaaagtgctatttaccatttaaactcaccatcgcggattagctcgtaaattggcacgatgatataaccaggccataaaagaatcggcttccaactatccttatcatcagcgtcagcctcttttagtagtgctcgcatcaggaaagcgccgcaaacatacagaattaaaacgatagcgatcaagataaaagtcaacataataaatcctctattccggtaattcttcagcaagacgcttgatgtgttccgctaactccaatgcgcctttcttgtcaaaaattccgcgaaactgcaaatgtgtgtcatcctcatatttgcagtcaatccacaccgatttcccttcgatgtaaataagcacgttatcaccatgccgatcttcaattagctttgctgtcatcgctcaattcctccacgccgtgagattttaagtgatcgtgtaactgctcgccgtagtcaattacctggtaaacagtcaagcccaggccgcgaaggtgtgcaataacgtttggcgagtcatcccaacatgcgacaatgcgatctagtccgatagtccgtaaaacttcctctttgattactgtatctttccggttgtcctccgcgcggcgcataattagccaatcgaaagaaacgccgttttcagctaaccaggctcgcgtttctgcttcaacttcatcactacgtcctgttaggatgataaccaggtatccggcgtcaaacatggcgttgcacacggaaatgttattgctgaatggtgaatcatcctttgcggcgcgattaaactcactccagctttcagtaagatgcaaatcaacagttggcaacaggtgcaagcggtgctcaccatttgacaatgtgccgtctaggtcgaaaataacgaaacgctgttttgtcgcaacatatggattaacataatcccttccccacaagttgatcgtaaacatcaattaccccgcaaactcaataatgctatacgcgatgccagccagcacaacggtagcgagcacaatcatagaaccgtatttcagaaactgcttgatagactctttagacatttttacttctcctttggttggttgatgcggtcattatacccatcagcacacatgaccgcttaacattttgtgctattgcgcttctaacttcataaccttgcgagccatgcgcttatactgcgatgcagtgattttgcttgtgtcggtaacgtggctattaaccattacaaacttgcgaccgtgaccaatccagtgatcatgactgtatgtgtgatcgtattcaaccaaatccggtcggaatgtatcacaatcaccctcaccgcctttcttaaccctttggtcaacaaacattgcaatatcaatttgaccgcgctcgttaacatgaaacaggtgcgcataagttgagcctttgccgcctttaaggtgtaatccataaaccgcgttgcgtgctaattccattttgtgatcctctcgttgtttggtatgggcttactataccgcaagcccaaaattctgttttagcaattcgtgctattgatcattttttttattctgtgtcggtagaattgcattacgtgctcattgtgccaactgctcactttatcacctcaatcaacaatccggcattcgccataggtgaacgggaaatgtgtgtcgctttcatagctatccggtatatcagcacattggcctttctctttgtcatagccagccgcgataagtgcatcaagaggaacgtcaaccatgccaacttcaataccgtaatcaatgcaattctcaatgcggatcgggaaggttaagtgtttcattccatcgtaagagccatcattcaggatctcaacagttacgcgtttcagttcaaacatttttattactccggtatgccaaagatagaaattaatgagtttgtgcggctgcggcgatatttgcgcattacagccgctacattctcgccagtttgatgacctaacgtgatcggcatctctgagccgtcgccgtattcattgccaacctttttgggcttatctctccaggcgtttataaatccgtattcatcacgagtgatatagcggtatatgttaggaattggtaacttgatcccatcaaaatccacttcctgcgtgtagctgcggaaattatgcatggaactcataaacaatcactcccatttcatcaacaacttgcgccttgtaataaccaccgttagcagcaagcagataagcctggctaagagtttcaaactcgcgggttactggctggcttgtttcgtgttcccaggtgattaaggtagtcattgtgttttcctcgtttcgtttcgatgtggtaattatgccaaactaccccaatcgagttttaacaaaaagtgctatttgccaatcaggatgtaatccgtcatttcagcattgacacggcaaaagcaaggattgaaaaagcaattgacaacagcgaaaatccagcagcagcgataaagaacaccacggcatgatctaaaagtttcttattcatcaaacgcccccaacaatatcaaaccaagaacaacaagcgccacgccaggatgaccgattgcaacgcaccacattgcagcgacaaatgcgaatgttttcattgaagtctcccgatagcgtcagcaaaaaccaggaatgcaagcgatccgaaagttgccgcaatcgcaaggataagcaagcataaacataactcaatatatttcgtattcattagcggatatcctcaaacgttttgaagtataagcggccttttgcgttgtgccatagcaattcatttgtttctatccatcttccggtgtctgtgcggattatgcgaccggaacgatattccagctttactatgttgccgccacttcttagatataggcgattaacaattgcagttgtacacatcctggattctttcagcaggtctacaccattaaaacggatcggacaaaacatgattattccccttgctcaaccattgacttaatcagatcctgataacgcttaattccgattgccgcgccctggagttgttcaccttccagatccgtgatatttggcattgtgtttagcagtcgcttggcgattcgctcaccgatcctcttttccagtgccggaatatcattttttgtgaatacctgtcgctttgcctcgcggttgattgccaccttaaaccctggcgcttcctcaaccggatcagtgcgagtaattgaaaccgttccgatctccttcacgtcagggacgcgattcatgatcgtgcgaatgtatgaggcgttaaccttcttcctgtcttgctcgtcgagattgtcctcgataagagcatcggcaatgatgtaattatcaagctctccgcttgctaacttcttcgccagttcacgcaagctgtcgcaaaactctttggtagttgccatgattggttatcctcctgttggttagttcgtggcggcatattatcgccgccatttgttctcgtcaagtagttttttgtgtgcttacgttccatacctatagtggaacaaattttcagcgtaagttaatgttttacttgaaattgaaaacgcgttctttggctgttcatgcgttcatgaattttcgcggattcctatatataaatatatttttctcaatccaccactagaccaggcgcaataggctaaatattaaccaaataccaccatcaacaatatatcacccaccactaaccatatggaacattagaaacagtatagaaacaaataaatacatatatatagataacttactgttttaattattattatatagagttttattttgttctttttgtgtggctaacacatagaaccgtcggagaactacgccgggtagatttgtgaacacccatgaacggaagataacagcgcggagcctggagtgatgttttgcgggaaaagttttctctgatcggcaaggtgtgattatttctgctctctcactactcaaatctaatcaaatcaaatcaatttcaatcacaaaatctcacacatcaatcatcatctgatcatataacgatcacataacaggatcatgagcctggtcgatacgtcgaactgattgttcgttaagatgaacgttggtaattttgctgatactgcatgaatagcactttttgttaaaaccaatcagtcacgaattgctatgattacctcaacgaaacgaactgaggattacacgatggaaaacttagtgattgcagtagacaagacaaactttgtactcgcagcggctgacaaaacaaacttttggatcgtgtgggacaaaatcgacgcagcaatcccaactggcaacaaatacctgaacaatctggaaatgcactattgcgaagcgctaaacatgcagacggaaggtaaagcggcttatgagatcgctaaacatttcggctttgaaactcttgagcaaatgttcacggcggttgctaatcaggcagaagaagatttcgaaattaaagcgtttggctaatagcacgaattgctaaaaaaggatcggggtatcttgatatagttgccccatcgaaaccaatcaggagattaacgatggaaattcaaactcaattcgaaactgtggttactgtacgcgatgcgagccacgaaaaaggattgttcaaaaaaggtactgaggttactgttgatattgatgatatggttgcatatcacggcggcattacctggaatattcaggttgttgagccaggcaagaaatttaaacttctggcattcaataccgtatttgaaactgtggaggctgcacaatgagtcgtttaaatttcatcggaaagaaagtaaaagttaaatcatctggaaagtgcatgttaagagtttggcgctttgatgaagatcgcgaatatgaaattttgatggatagacaaaatgacttgcatatttcagacaatcgcggccttgccctttgtctttgcataactgaagatggaaagcggttatacgcgccaggcgttgaaagtatttattcaattgaggtgatgaaatgatcaataatacttatcgcgtcgttgcaatcagtcgcgcaaatggtaagcgagttgtgtgctatgaaggtgatcgcgcttgcctggcaactgatacatatgaggaattaacaaaacgtcgccctactttttactccgatttcaaagtggtgcttgagcgccttgagcctgtaattgtcatggagagtgattgatggagctattttttattcctaacgcttggattcttgctgttgctaatgaccattacggaggcgacggaaagcgtgcgaaaaggtattcgtattttaattaaatagcactttttgttaaaagcgatccggtttgttttggcataatacattcatcgaaacgaaccggagaatttaaaatgaattggcacgacttttttatatatgattgcggtaatcttataagaaagccgcgcacaaacataagatcatatagagattctgcatggaataaaaagtgggctggaaaagttgcaggaagcattagaaatgatggatacatagagataacattgaatgataaaagttatcttgcgcatcgaatcgtttgggaaatgcataatggcaaaattccagaaggaatgcagattgatcatataaaccacgacagaattgataacaggatagaaaacctacgccttgttagtgcaaatgaaaacggtaaaaatcaatcatattgcaaagcaaataaatcagggtttaacggtgtttcgtggcattccgtagctaaaaaatggagagcaagattaaaagtagaaggaaaagaaatccatattggtctttttgattctcctgaattagctagcatggctattgagagagaaaaaataaacaggggttttcatgaaaaccacggcaaaaagaaagcgtaggcaaattaattgcaggtgttccgcttatcatttcgttcataggtttggcggcggcttgtgtaccggaattcagatcgctgaggaaaacgtaggcggcaacctttgccagcactgctatctgtttaatagtggctgtgaagtgctaaaaggccaagagtcgccgcgcgaatgcgcatatgtgcaagaattcatagaatatcatgaggttaaattatgacctacttcaaaaatataaaaaccggaagaatttaccgcgtgaacctgcgtcataaaaacgctttaattatgagcaaaggaggctgttgggttaggtctgcacgttatagaaatgcagatttaacaggctatccgtttatcgccgtaaacagcacgaattgctaaaaacgatatcgctctgactggtatcatactttcacacaaacaaaatggagaatcaaaaatgaaactgaaaactgaatccatcatgaacattgtcaaagctcacgggaaagtagttttgaaaatggatcgcgattctggattccatcagttaacgattacccgcgtaaaaactggttacgctgttggcgaacacccaggcggaagaatacgtcgcatgactgaaagcgatgcttacgcgatgattgacgaaatgagcatgtttattgagaagtggggttgatatggttcaagatgctttctttgctcgcctacatgaagcggaggcggctggactcaacaaggaatgggcgcttaaagttgcctatcttgaaataacgcttgatgacgcattaggcgctatggatatggatcaagaaagtagcgtgatgcttgctgatcctaacgcaataatcaatgattgcggttgtaacttcgatccatcttgcaagcgttgtttcccattctaaggagtatttaaaatgacacctatcgaaaaaatttgctgtccaaaacacggcggaagcggggataaaacaacatgcccattctgtaagtaaaaaatagaggcctgtttcgcattatgtcgcgatttcaggccgtaactaatacgattgtcacacctacaaacaaaatgccttgcaaggtaatacagaaaggatttaaacatgcttattttctcactatttgatggttctggttatgctgcgttgccgtgggctgaacgtggtcacaaagtgctgtgctttaatttcgacggtgctgatcatggtgattaccaatcagtgcgcgtgactcatcccaacatagtttatttgaatgagtggatcggattatcattccagcataacgcaatgatgcgcgtctttggcactccagattttattattgcattccctccatgcactgatttagctgttagcggatcgcgtcactttgcagcaaagcgtgaacgtgatccagacttccagaaaaaggcggttgaaacggcaaagattgctgccaatattgcggatcggtttaacgttccatacatgattgagaatcctgttagtgttctgtcgtcaatgtggcggcaacctgattttatctttcatccttgcgcgtttggaggtctgttgccggaagatgataaacatcctcactttcctgaaatcattcccgctcgcgatgcgtacaccaaaaaaacttgtctttggacgggtaacggctttgtaatgccggatacaaacgcagtattgcaaacagggaacaacaatccaggctggcaaaagctcggcggcaagtctaagcgaacaaagctgatccgctcactcactccgcgcggctttgcgcttgctgtatgcctggcaaatcagaaatagcactttttgttaaaacgccggatcacgtatccggcataatgctttcaacgaaaacaaaaggagataaatcaaatggctaaattcaaatcaatcaaacttatcggatctgataaccgcctatacaaagcgcgggtagacgaaaatgatgatactttcgttaagttagatgggaaatggattcacgccaacttaaccggattaacattccgaaatgttaagaccaaaaccattaaatgcacatgggtaaaccactccatgcagatcaagaaaactttcaaagccgataagcgttaccagatcgaacaaggccgcgtgttaggtgctgttgctggatacgtgttcgacgaaaacggcgaccgtttcacgctgtatcgtgaagaagttggattttcagccgctggcggtgcttatctgtttgaggccaaatactcatgagtttaccagaaaaagactatacgcctcaccgttctgaggctatgcaaaaatatcgttacaaggttgtttttagtgcgatatcgtcattaaaggaaggtgaaacggtctatcgcatcagggataagcattcatatttgctgattggtcatacgttccatcgttcgcttgcattcgatcctaaaactcttgaatgtcatagcattatagatggaaggttattagccagggttgagccgatcaaatagcacgaattgctaaaaggctgtagaatgttgccgttataattagcggcaacaagaaggagatttttagatgtttgactttgacaccaacaaattgacacctcaacaagttatagccattgcagaatcgcagggaacatcgccgcttcgcgttgctattcagtctaacggctaccgccaatcgtccagcttttgggaacctgtaaaggatatcaacggcgctaatgaccgctatcctgtgatctctttgggtaatgatgttgatgttgtgggtaaactgtcacgtagcattgcgcaatctgttcaatttcctgaatcatcggcctatatgcatttcattggttgcgtttccgccgctatggttggacgcttccaagttgagtaccacggcactgaacaaccaacggcgctttatgttgtaaccagtcagccgccatcaactggtaaatcagcaatcaacagcctggctattgcgccaatggtctgtgaagttgagcgcatcaacgaacaacgcaagaaagagcgaaagaagatcgcagcgaaattaaaaggcgttgaaaaggaattgaaagctgaacgttccggcactgagttagcggcgctgtttgaggaaaaggaggaattagaggaaaagttagaaaaaatgtgcgatatcgtttttccggtatcagacaccacgccggaagggttagcaaagatcaacaatcgccagggtaactttgctgtcatttccgatgaagcaacaagcatcaacagcttactcggattgacttacgctaatagtgatcgcaagactaacagcgaattggttctaaaagcatgggacgccggacacgtttcaatagctcgcgccaactctgaaaacaatatgagttttgttgcgttgggctgcatgagcgtaattgcccaggatgaaacgataaaagggatcatggatgcaggggcgcgtggtatcggtgttagtgaacgtttcttgcttgtacgtgaaaaaacaatgttaggcgagcgtgtatttattgatgaaaatggtgatcttgattacacgccagttgataaagaattaaaggcgcaatatttccagttgattcataacatcatgactgaacaaaatgtggtattgaagccgtcacgttctgcaatgcgtgttcttaatattgctcgccagcaattagagccagatttagcagacggcgggaaatattcacatacaatgttgcgtggtgctttgggtaaaatggataagcaagtgatccgcattgcgtcagtattgcacacgatccgcaattggtttaatccaaacggtacgccgcaaaagtcgcgagaaattgaagttgagacaatgcaagaggctttggtgatgttcagcgaattaagcaaaacatatatcaacgccgcgaatgcttccggtcacgctggagatgatgcagaaatgagcaagttaattgaaataatcattaagatctcacgtcaaaataaaggcgttaccaatgcaagagctatctatgaaagtgcgcgtaaggttaagccgtttacaggtcaatcaggagtgatgaaacgaattgaggaacaattattgccaatgcttgaagaaaagaattatgtttgcagcgttggtaaatttgtttatgtaaatccggcgttaatggggtaatcatgttcttattagatctgtatcgcttttgcgagtctcgcgagaaattcaaccgccaagagttagcaagatttatattccgtcaccgtgaatgtgaaaggctcgccaaaaatgcgggggtaacgccccgctatttcgcttcaagctcaagcaaagagtttatagcgcgaatgatgggttatggatatcttgacggcgttcattgcgtgtactggtgcaaaaacaagatgaaaaggccgtttaattttgagttgcatagcctggaaggtgattccaatcgttatgtgtgggagatgatgaacattgagaaaatgagcgatgaagaattattcagcaagccagcatttgatagatcttattttgaaagaaagttcagcaatgcaaatttcgcatgatgattttgtctatgcactaatgttgttgctttacagtgatatgcgagcgtttgaagataatgagcaccagttaacaaatgatgacggtgaactactaattcacgtcaggcgctttgaatagcactttttgttaaaacacccgatcttgtatcgggtatatttgttttaacgaaacgtagcaacaaaaggaaaacaaaatgttaaaatgcactatcaaaacaattcgcgttgttaatgttacatttgacgttttcaacaacaaaggaaccgcatatgttgatgatggtagtacgtttggcattaaccgctgcgaatatgaaaaaatgctgtgggatataaaaaagaaaggcgctcacattattgaggaaaaggattatagcggtaatagtttccaagacttaatgaacaatattttttaaaagaaaaggcggcttatgccgccttgttacgtttaagtgcccaccctgccagcatacccgcaataaacatcaatatacccattgcgattgccggaacattaagaccatcattatttcggatctctattctttccgctgtgatgttatctgccttaatgcttgaagtgctcacctgttttttattcgacgtgtcaacctttccaacagccgattctttaaatgtggtttcctgcttgcttgatgtatcatgctttgcagttacaccaacagtttgtttcacattttcagatcctgcctgtgctgttatatcgggcttgctaccaatcaggccaggtaacaagctcgacgcagaacaaccggaaagcataacgcacatcaaaacagccattaatttctttttcatttaagatcccttacgcaatatttatattcgacggcgcggcggttcttcaatcctcttgatttttcctttttaccagttttagggttccggtaatatgtccagttccatagctcaccacaaccgccccatagatcaccattgttgatctttttcagcatggttgacttacgaaacgcgccagtaccagcattaaaagtgaatgagtatagagccgctcgcattgataaaggaatttcaaccttaaccgccttatcaacagcgtcagccgctactttcatgtgttttgctaatagcgcgtcacattctcgcctggtatattcctttccaagaatcacatcctttccggtaatgccgtggcataccgtccagattccagcaatatccttgtaaggcttatactttacgccctcaatttcttcaatcaaaggcgatgccaacattaaagccgcccctgtgacggtggcggctatacctttcttgattgtcattacaccctctctttctgccgtagattaagcgccgtttttaaatcccctgaatctaaagcctctcggatcgctttactatcacgccatttcagccatgcgccccaacagccgaaaatagcgaacaaaataaacgtagcaagtgcaagcaaaaactcaccagtaaaagatccaactaccgttgcacctccgaaagagttttgcgccattaaaagaaagtctctcataatctgatcctcaattaaattaaaatgtcaatgccaaaattagtgtgaatatgttaaccacaaaaacaaaaaaaggccagcacttagccagcctttttcttgataatttaattaagcaatcatttcagggtaaaacataaaccgccctatttcgccatattccttatcataaataattaccgccgccctgcgacgtgaacgccagccaccacgcgcggcgtaagcgtcttttgctgccatagtgctatgcacctcaacaatgccaaggctcgtttctgtaacagtctggtgatgccaatgccctacatgcgcatacattgaattggagtttccgaaatcttcccgccaatccgctgcacacatcattaaaagcgtttctggcttgcgtacagtgtgaccatgatgataagccaggaaagttttaccatattgagtgtgatgcacgacgcgcggagaaacatcaacctttacgcgtggctcattctcatacgccgccgccattgcagcacgtagccagatcattcctgattggtcgtgattaccttcaatgatctgcaattcaacctctttatgtttttccagcattctgcttactgctctgcgcgtggctcgaatggcaacataaacaagtttcgcatatcgcgaatcctgatccaaaacgtgaccgcttgcaggtgttacagcctccaggccgtcgctgtgaatcatatcaccaccaatcagcaatacagccttttcgctattcggtgctttatcgacggcataatcaaagaattcattcatgatcttttctgccgttgctgtgtcgtaattctctccgctttcatgcttatgagccattgcaccaatatgaatatcaaagatcggatatagcgcaagggttttcgaatagtcagtaatcttttccggctgtggttccaggcgtggcaactcgtcagaaaatgcagccatagccgcttgcattattgcctctaactggtctttatctttgtgcgtcttaatccaggttagtttagtattgccgtttttatcaactaactttgactcgccaattaccgcaaagccaggtgatccgatagttgagatctcgccacgctttgctaatttgctgtggcggtgctcaacctggcgcaagctcattccgtatttttccgcaatctcacgcagttttaaacccgcctcacgttcagcgatcaattgctcgtcggtaatcttttttaaactcattttaacatcctcttaattcataacaacggcgtacataataacccaagcgataacaggcggcaacaaaataacagaaatgtatctcatttgtaatatttcttctgctctttggttttgttaataacttctttatagtcgattgttgttggtattgctggaacacggtgaacacgtcgcggcttttcttcaacatacgccatttcgtcaccaacaataacgcacacgtctttaatatcgaaatactttgctattttggcgatcccttcatcaagaccgccttttttagcaagctcccaagtttcctttttacctttcttcactttcataaccgtaagcctttttaagtaactccattgcgtcattccaaagtatttgtgcaataacctttggatttttgcgatcaagcataaacaatgattctttagccagccattgcgcatctttgaagtattcgacgtttacgattttcatttttgaaatcctcttgttttccgttaagcacataatacaaaacccgccgtagcgggttttaacaaaaagtgctatttcacattgaaaaatcgtgcgccctctctgcgtttgtattgtatcaggtcgtgctcaatttttctttcccacatgtacaaaggcgcaactttgatttcgtcaaatgtcatatccaggcagtttatcaactccattttatcatcgttataaccatgcttatcaagtaagcgaattgtcataccgacaaataaatcccatttcatgtgatcggctaatcgaatgctcattttaaatactccgcgctttggctcgtttattttttacggaagggcaaatgtcgctaatcttcacatagtgcgtttgctgttgctcaccttcttccaattggcgcatgataaaaattacactacctttattgtttccgctaactggctcacctgtcatgccagaaataaacgccactcgaccagttctggaatattcgcgaccttcttcatccttccaggtttcaccagtaatccagataatttctgccgcatgtttttgtgcgtcactaaaccatgcagttgaattatcagccggaagtaaaatatcaatctggtttccgtgttccatctgctcaattgcttttttgataaatggatctggattgctgtatggtggatttaaccaaacgtgcttattgctaccccaccaacgctttaagcagtttgtttctttgctgtaaaatttatcgcattttttattatcttccgttgctgctgcgtcaagatcatatttgccgtaacgttcagcaaggtattcaacaatttcatctggagtttcccacaagtcgcgcactacgtccggcgttttacttcctgcataacggttgccgctaaccttaaataatgggttttctctaactggctgataatgaccgcctgaacgtaaagcaatatctgaatatctgccgtgttgcagttcatgaaaatccatttccggctcaaaagtatcaatggttgctttgtcctgaaaatccttagccattttattttacctcgcaagttagagtgttctgataaacgccaactttaatatcaatggtgctatcgttaacagtgtaaaaagccgttccaattggcgtaaacagcttatattgatttttgctgatattatccattacaacgcctgtgcttttaccttgcacaactttcatatattcgcttgtaacctcaaacgcttcatttccgcaaatatatgtttttggtttatccatgcaaccaacaatggcaagtgataaagcaactactgataacatctttttcatggttaattctccgtttcgttctgatgtgtgcattatggcgcattccgtcgcgcctgttttaacaaaaagtgctattttgtagcgtctgcgatagccaattttacttgatctacaccatagcatactgcggcaaatcctccgcattccctaacgcggcgcaagaattccctttgttcctggcttactttagttcctttcttgttggctcgtttaagctcaattgcaatgaatgcatatttgcagccaataaaaccagtcaggattagaatgtcgcttactcctttttttacacctgcttgctgatcctttactgctgtgcctattgttttcttcccttcgtttttagtgtgccaaacaagccacattggaaactcatatgttaaccatgaataagaatcaacctggtgcgcttcctcttttctgtcatctggatctgatttgtcgtaatactccagataatcgcctttatcagtaaccatttttaaaactccttctgtgcgatcaaatcttctttctttgtgttcttgcgatgggtaacacgttttggcggcaatatttgccccgcataactcatgatcttaattgcattgcggcaagcgatcataaagtttgcggcttggcgatctataacatgtgttctaaccgcctttgtccaaagcgttttacatatcttgtgttctgattcagggaaatatttttcgtatgccctgaattctacgccgccactatcacgtaacgtgtagcagaatattacgccagcctggttttttgtcagcgtcacattaaaatctaacacgtcgcaccaatcgtttttacggtacatcttgccggataagttatcatttggatcgcgtaactgaacattacagcaacggcatacacgcgccgcaacgtcattttttgcgccgcaaccttttacaataactttctttgtgcggtcatcaatctgatcctcacattcctggaacgtccagaaatgttcacaacgatttccgttttcatcctcattaatgcaacggcgagcatagaatgaattttctgtaccgcaaatcgggcaatatttcggatctttgtcctgtgatttacgtaactggaattgcgcttgctctaacatcggatcgaaatacaaattacccatttcaaacatcgtgcctgaaaaatccaaaacaaggtgatccgttttgtgcatccccaatacttctttatggtatgtttttaattgacgcataccacgccccaaaagctgagttaatagcgtgagacttccgatcttacgcaaaataacagaagtatcccacggcggcacgttcacgccagttgttagcgcctgaacctgaaaaatatatttcaccctgccttcataagcatcctcaagccataagcgcctctgtttctctccagtttttccggtaataatgtgatatttcgtgccaggaggaagcgccgccgctgcctctttgcagtgcctttcgtcagcgcaagtaacaagagcgcacaagcggtttttcatcacctcgtgaaccatctgcattattttctgcgtcatggttcctgattggtgaatcttgtcactcatggcctttaattgcttctggtcataatcagcaacgccaaattcattcactggcgtaaattctgataagtcgtaacccaaatcaccaacattgccaaaataagtgggaacaactgaaccaaattttaccaggtaatcagtatcaatgtttgtgatctgctcacgccaaaacccaggaattcttttatcttcgacaagtatcggctcaattccgcgatattccgatcctgtcattccaaatatacgcaactgatgaccgtaagtctcaagacaacggcggcgcatttctgcaatgataatggtgtattgtgcgcggcctgaaccaatcagcaacggattgccttcaactggttcacctttcggtgtcatcatttgctctatgctttcgccgttttcctcggcttcaacaatatcattccagttgacttgatgacattcatctatacctaaaacctgtgggacgtaatcacctaacgccttattcaatccgccaattacagtaccttccgatcctacaacaatcgggaaataagcgcttttggtattcaggccagcgcaataaacggaattcggaacaccaaaggcgctaatctcttttgaatcctgatccacaatttcagattgacgcgccagaaataacgctttcaatcccattttcctgcactgagccgcaaccatagcaaagatgattgttttacctgccgacaccgccgctttaacgaaaaacggatcaacatacttactcaagcgctttgcaatttcagcgtaagcaacgcattggtattcatacgggacaatctcaccaaccgtgaaacgcttctggattgccttaatcctttcctctcccagatctgcaatctgcttttcaatgttaggaatcattttttatccttttgactaaatgccatttgcggcatatcatacacaaacttaatcaagttttttagcaaaaagtgctataggtgaaaatatgagcgaaatcaaaattgcggcctcaacgggcgaaatcgacaaacgcacaatcaatggtaacaacggcgtaaggcgtggtaaagaccggaagcgccgcgcacctgttagcggttatctggtactaaaggaagaagtaagggcaggattaaaagcgaggcttgatgaggtggttagcgcttatggcggctgtgctgcgttggcgcgtgagattggcgttaaccttaaaacagtgtggggatggaaagagcgcggcatgatttcagctaaaggcgctgaactgatccaaaaggattaccgccgcaaaggttttaacggcttccgcgcttcatattgccgtccagatttgcgctttgacaacaacggcaagccattagagaatcgttgcagcaacagaaagctcatgcgatttgtaaccaaagaggaagcggaagcaagaggatttgtgcgtccttacgatccgttgcggtctatgagtccagaagaacgcgagaaggagaaagcgcggcgcaaggctgaacgagacaaggcgaaagaagaacggcgcaaagcaaaggaagccaatcagaagaaacgcgttgtgatttccgtcgatagcactgattgctaaaaattccggcctggcatggtttatcatcgtgccagttttttttatttggatgttgagaaatgcattatcaaaaagaagaagtaatcccaaagatgcgcggcatgtggcaagcggcattgatgaaactttgcgatattcctcaattaacctttaacggaaagcatcagccttgcccttattgcggcggtaaagatcgctttcgttggactgacaaaatcaacgagaaaggcgacggcggaaacatttgcaaccaatgcgggaatgattcagggatcggattattcatgcgcatacgtggtgaaaattacagtgaagcaatcgacactctaggagaatggttaaacctggttccggttgaggttgtcaacaaggccaacaaagcggcaaaacgtgactcaggttacaatttcggatcgcaagcaccacatgaaaaatgtgttgaggtgatggataaaactgaacgcatggaaataacaaatctaagcgtttttgaggcgttttatccattagacggcgaatcgtatcaagttggagtaaaaactcatgacaatggatattgcgagcatatacacgcaattccttgccacttggtgcatagcgatgaactggatgatgaaatgtgtaatattcttttcgtcaatgaggaaggtcaaagcagtttttacgctaaggattacacgcgcggctccgttgcggtaactggcaagactgacaaaacaatttacctttgcgttgattggattgatgcgcaacatatccacctagctacgggacaagaagtatgggcttgcttctctgcgtcgaatcttgaaatagtagcgtatcgctacaaaggtgatcgcaaaatgcgcgttgtgtgccatgctaatgatcgcgatactttgattgctgctgatgatcgcgaattagacgtaatgttaccaattaacggtaaattcaaaaatggaatagagcggaggctttacaaggcaagtgacttattataatattcatcctgctactaacacttttcgatgaatctgtttcattgacttctcgttgtcgttaacgatgccccgcttcggcggggttttttattgcatgtaacaaatggctgtagcataattacatgacctattttaacaaaaaatgctatgaggtgaaattatggctttatatcgcactggtacggctgcaatggacgcacaaggcgttatcactggtactggcacaaaatggcgtgagccgctttctcttattcgcactggcgcaacaatcgtttttttaaccacgcctttaaagctggcggttatcagcgatattgtaagcgacacggaaatgaaagcgatccagactgacggcgagccagtagcaaacggaaattatgtaatcctgttgaatgactcgctaactgtcgatggaatggcgcaagatgtagcggaaacgctgagatattaccaaagtaaagaaacggttattgaggaagcaattgaattcttcaaaaactttgaccttaaaacattacaggatcttgttgctcgcgctgagtcttccgcacaaaaaacggatgcagatcgcgccgcaactgagcaattaaaaaacgacacgcaagctattaaggatgccgctgtttctgagactacgcaaattaaagatactgcgattgcagaaactcaacggattaaggatgctgctgtttatgaaaccaatcagattaaggcagacactgacgcaataaaaacgcagacgcaacaaataaaagatagcgccgttgctgaaattggatcaattaaaaacgaggctgttaatgctcgcgatgcagcaaaggaatcacaacttgccgctgaacaatcaaagattgccgccgactctgcaaaggctggagctgaaactgcgcgtgatgaagctcgccaatgggcacaacaagttaaccctgaaaaccttctgcataaggatcagaatcttaatgatcttgctaataaagatttagcaagggaggcgctgaaagttgaggctgttaattcagttaaggggcaaaatccaggtgattataactcatttcgtaaccctgcatggacttatgaattacggatcgcaaacaacggcgagtggcgagttgcaagaaatagcgataacagcacatccgctctttctgttggtgctggcggcactggtgcggaaaatattgaaggtgcaagaaaaaactttcgtgtgcaaggtgttttttgcattactagcgaaacaccaggagattttaactccataaaatcacctgatggaaaactaaatatgcttgtagctaacaatggtgtgtggggtgttcaagatgattatggaaacatcaaaccattacacatcgaacgaggaggcactggcgctcaaagcatagggcaagcaaggagtaattttggcattggtgaaactgacattcctgtttttagaggaataagcctaacagaaaaaaactctgcaaactccggcatactttatttgttaaacaaaaatgcagaaggagtacagatttcgtattcaagggtttacaacgaaattcagggtgggattgcaaaggcaactattcaagtaactagagaaggtggcgacacaaactattatcagtttgatgaaagtggcaacgcgctgaattacaactcaataacaatcggtagggggattggtaatgctcttggtagtaactctatagtaattggagatactgatactggatttaggcaaaatggagatggcattcttcaagctattgctgataatcaagtgatgtttgcatttacaaagagtggcaatgttgcatacagaactattcaatcatttgctccagaagatgcacgttttgcttatgttgaaggtgttaggaggggtggtgcgaattgctttataggtgggcatgttgagggtggtgcttttactgcatggcgtgatcgcgccgctggtatgcttgttgaacttccaggcgatgatgtagccgttaacgttgttaaggttgtaaggtggggttatgattgggtttttggtatagatgttgccagatatggcgctggaggttgcgaagctcacctaaacgtaagaggtacatcatacacttttaatgatgctggttatgcaagcgctgttcaatgggttaatacatctgatattcgactaaaggcaaatctaaaggagattaaaagcgccaaagataaagttaaatcaattaagggatacacttactttaagcgcaatagcctagaagaagatgaaaattctttctactctgaggaagctggcgtaatagctcaagatgttcagactgttttgccggaagcggtttacaaggtatctgattctgaaattttaggcgttagctatggcggtgtaa
